(19) United States
(12) Patent Application Publication
(10) Pub. No.: US 2018/0303952 A1
(43) Pub. Date: Oct. 25, 2018

(54) CD147 ANTIBODIES, ACTIVATABLE CD147 ANTIBODIES, AND METHODS OF MAKING AND USE THEREOF

(71) Applicant: CytomX Therapeutics, Inc., South San Francisco, CA (US)

(72) Inventors: Jason Gary SAGERT, San Mateo, CA (US); Shuoyen Jack Lin, Millbrae, CA (US); James William West, Bend, OR (US); Jonathan Alexander Terrett, Lexington, MA (US)

(21) Appl. No.: 15/917,404

(22) Filed: Mar. 9, 2018

Related U.S. Application Data
(60) Provisional application No. 62/469,429, filed on Mar. 9, 2017.

(51) Int. Cl. A61K 47/68; C07K 16/30; A61P 35/00; A61K 45/06

(52) U.S. Cl. CPC A61K 47/6849; C07K 16/30; G01N 33/56966; A61P 35/00; A61K 45/06; A61K 47/6803

(57) ABSTRACT

The invention relates generally to antibodies that bind CD147, activatable antibodies that bind to CD147 and methods of making and using these antibodies and activatable antibodies in a variety of therapeutic, prophylactic, and diagnostic contexts. In some embodiments, the CD147 antibodies and CD147 activatable antibodies bind human and cynomolgus monkey CD147.

### CROSS-REFERENCE TO RELATED APPLICATIONS

[0001] This application claims the benefit of U.S. provisional application No. 62/469,429, filed Mar. 9, 2017, the contents of which are incorporated by reference in their entirety.

### INCORPORATION OF SEQUENCE LISTING

[0002] The contents of the text file named “CYTM_050_001US_SeqList_ST25.txt”, which was created on Jul. 12, 2018 and is 580 KB in size, are hereby incorporated by reference in their entirety.

### FIELD OF THE INVENTION

[0003] The invention relates generally to antibodies that bind CD147, activatable antibodies that bind to CD147 and methods of making and using these antibodies and activatable antibodies in a variety of therapeutic, prophylactic, and diagnostic contexts.

### BACKGROUND OF THE INVENTION

[0004] Antibody-based therapies have proven effective treatments for several diseases but in some cases, toxicities due to broad target expression have limited their therapeutic effectiveness. In addition, antibody-based therapeutics have exhibited other limitations such as rapid clearance from the circulation following administration.

[0005] In the realm of small molecule therapeutics, strategies have been developed to provide prodrugs of an active chemical entity. Such prodrugs are administered in a relatively inactive (or significantly less active) form. Once administered, the prodrug is metabolized in vivo into the active compound. Such prodrug strategies can provide for increased selectivity of the drug for its intended target and for a reduction of adverse effects.

[0006] Accordingly, there is a continued need in the field of antibody-based therapeutics for antibodies that mimic the desirable characteristics of the small molecule prodrug.

### BRIEF SUMMARY OF THE INVENTION

[0007] Provided herein are antibodies that bind CD147, activatable antibodies that bind to CD147 and methods of making and using these antibodies and activatable antibodies in a variety of therapeutic, prophylactic, and diagnostic contexts. In some embodiments, the CD147 antibodies and CD147 activatable antibodies bind human and cynomolgus monkey CD147. In some embodiments, the CD147 antibodies and CD147 activatable antibodies bind both the glycosylated and deglycosylated forms of the CD147 antigen.

[0008] In one aspect of the invention, provided herein is an antibody or an antigen binding fragment thereof (AB) that specifically binds human CD147 and cynomolgus monkey CD147. In another aspect of the invention, provided herein is an antibody or an antigen binding fragment thereof (AB) that specifically binds human CD147 and/or cynomolgus monkey CD147. In some embodiments, the CD147 includes both deglycosylated CD147 and glycosylated CD147. In some embodiments, the AB specifically binds human CD147. In some embodiments, the AB only binds human CD147. In any of the antibodies or antibody binding fragments thereof, the AB can be selected from the group consisting of a Fab fragment, a F(ab′)2 fragment, a scFv, a scAb, a dAb, a single domain heavy chain antibody, and a single domain light chain antibody. In some embodiments, the antibody or antigen binding fragment thereof comprises an amino acid sequence comprising amino acid sequences selected from the group consisting of: (a) the VH CDR1 sequence GFTFSNYWMN (SEQ ID NO: 10) or GFTFSNYWMD (SEQ ID NO: 11); the VH CDR2 sequence EIRLKSYNYATH (SEQ ID NO: 12); the VH CDR3 sequence AGTDY (SEQ ID NO: 13); the VL CDR1 sequence KASQSVRTDVA (SEQ ID NO: 14) or RASQSVRTDVG (SEQ ID NO: 15); the VL CDR2 sequence YSSNRYT (SEQ ID NO: 16); and the VL CDR3 sequence QQDYSSPFT (SEQ ID NO: 17) or QQDYSSPYT (SEQ ID NO: 18), (b) the VH CDR1 sequence GFTFSNYWMD (SEQ ID NO: 11); the VH CDR2 sequence EIRLKSYNYATH (SEQ ID NO: 12); the VH CDR3 sequence AGTDY (SEQ ID NO: 13); the VL CDR1 sequence RASQSVRTDVG (SEQ ID NO: 15); the VL CDR2 sequence YSSNRYT (SEQ ID NO: 16); and the VL CDR3 sequence QQDYSSPYT (SEQ ID NO: 18), and (c) the VH CDR1 sequence GFTFSNYWMN (SEQ ID NO: 10); the VH CDR2 sequence EIRLKSYNYATH (SEQ ID NO: 12); the VH CDR3 sequence AGTDY (SEQ ID NO: 13); the VL CDR1 sequence KASQSVRTDVA (SEQ ID NO: 14); the VL CDR2 sequence YSSNRYT (SEQ ID NO: 16); and the VL CDR3 sequence QQDYSSPFT (SEQ ID NO: 17). In some embodiments, the antibody or antigen binding fragment thereof comprises a heavy chain variable region comprising an amino acid sequence selected from the group consisting of SEQ ID NOs: 1-4, and a light chain variable region comprising an amino acid sequence selected from the group consisting of SEQ ID NOs: 5-9.

[0009] In another aspect of the invention, provided herein is an activatable antibody that, in an activated state, binds CD147 comprising: (a) an antibody or an antigen binding fragment thereof (AB) that specifically binds to human CD147 and cynomolgus monkey CD147; (b) a masking moiety (MM) coupled to the AB, wherein the MM inhibits the binding of the AB to CD147 when the activatable antibody is in an uncleaved (unactivated state) state; and (c) a cleavable moiety (CM) coupled to the AB, wherein the CM is a polypeptide that functions as a substrate for a protease. In some embodiments, the CD147 includes both deglycosylated CD147 and glycosylated CD147. In any of the activatable antibodies provided herein, the AB can be selected from the group consisting of a Fab fragment, a F(ab′)2 fragment, a scFv, a scAb, a dAb, a single domain heavy chain antibody, and a single domain light chain antibody. In any of the activatable antibodies provided herein, the AB specifically binds human CD147. In any of the activatable antibodies provided herein, the AB only binds human CD147. In some embodiments, the AB of the activatable antibody comprises an amino acid sequence comprising amino acid sequences selected from the group consisting of: (a) the VH CDR1 sequence GFTFSNYWMN (SEQ ID NO: 10) or GFTFSNYWMD (SEQ ID NO: 11); the VH CDR2 sequence EIRLKSYNYATH (SEQ ID NO: 12); the VH CDR3 sequence AGTDY (SEQ ID NO: 13); the VL CDR1 sequence KASQSVRTDVA (SEQ ID NO: 14) or RASQSVRTDVG (SEQ ID NO: 15); the VL CDR2 sequence YSSNRYT (SEQ ID NO: 16); and the VL CDR3 sequence QQDYSSPFT (SEQ ID NO: 17) or QQDYSSPYT (SEQ ID NO: 18), (b) the VH CDR1 sequence GFTFSNYWMD (SEQ ID NO: 11); the VH CDR2 sequence EIRLKSYNYATH (SEQ ID NO: 12); the VH CDR3 sequence AGTDY (SEQ ID NO: 13); the VL CDR1 sequence RASQSVRTDVG (SEQ ID NO: 15); the VL CDR2 sequence YSSNRYT (SEQ ID NO: 16); and the VL CDR3 sequence QQDYSSPYT (SEQ ID NO: 18), and (c) the VH CDR1 sequence GFTFSNYWMN (SEQ ID NO: 10); the VH CDR2 sequence EIRLKSYNYATH (SEQ ID NO: 12); the VH CDR3 sequence AGTDY (SEQ ID NO: 13); the VL CDR1 sequence KASQSVRTDVA (SEQ ID NO: 14); the VL CDR2 sequence YSSNRYT (SEQ ID NO: 16); and the VL CDR3 sequence QQDYSSPFT (SEQ ID NO: 17). In some embodiments, the AB of the activatable antibody comprises a heavy chain variable region comprising an amino acid sequence selected from the group consisting of SEQ ID NOs: 1-4, and a light chain variable region comprising an amino acid sequence selected from the group consisting of SEQ ID NOs: 5-9. In some embodiments, the AB of the activatable antibody comprises a heavy chain variable region comprising an amino acid sequence selected from the group consisting of SEQ ID NOs: 1-3, and a light chain variable region comprising an amino acid sequence selected from the group consisting of SEQ ID NOs: 5-8. In some embodiments, the activatable antibody comprises the heavy chain sequence selected from the group consisting of SEQ ID NOs: 1-4 and 19-22 and a light chain comprising an amino acid sequence selected from the group consisting of SEQ ID NOs: 5-9, 23-27, 140-182, 185-227, 230-272, and 275-317. In some embodiments, the MM has a dissociation constant for binding to the AB that is greater than the dissociation constant of the AB to CD147. In some embodiments, the MM does not interfere or compete with the AB for binding to CD147 when the activatable antibody is in a cleaved state. In some embodiments, the MM is a polypeptide of no more than 40 amino acids in length. In some embodiments, the MM polypeptide sequence is different from that of human CD147. In some embodiments, the MM polypeptide sequence is no more than 50% identical to any natural binding partner of the AB. In some embodiments, the MM comprises an amino acid sequence selected from the group consisting of SEQ ID NOs: 30-100. In some embodiments, the MM comprises an amino acid sequence selected from the group consisting of SEQ ID NOs: 30, 31, 33, 44, 46, 75-80, 82, 83, and 86-100. In some embodiments, the CM is a substrate for a protease that is active in diseased tissue. In some embodiments, the CM comprises an amino acid sequence selected from the group consisting of SEQ ID NOs: 356-423, 680-698, 713, 714, and 789-808. In some embodiments, the CM comprises an amino acid sequence selected from the group consisting of SEQ ID NOs: 359, 370, 377, 382, 390, 397, 406-423, 680-698, 713, 714, and 807-808.

[0010] In another aspect provided herein, any one of the antibodies or activatable antibodies provided herein are conjugated to an agent, generating a conjugated antibody or conjugated activatable antibody. In some embodiments, the agent is a toxin or fragment thereof. In some embodiments, the agent is a microtubule inhibitor. In some embodiments, the agent is a nucleic acid damaging agent. In some embodiments, the agent is a detectable moiety. In some embodiments, the detectable moiety is a diagnostic agent.

[0011] In another aspect, provided herein is a pharmaceutical composition comprising any of the antibodies, activatable antibodies, conjugated antibodies or conjugated activatable antibodies provided herein; and a carrier. In some embodiments, the pharmaceutical composition of comprises an additional agent. In some embodiments, the additional agent is a therapeutic agent.

[0012] In another aspect, provided herein is an isolated nucleic acid molecule encoding any one of the antibodies or activatable antibodies described herein. In a related aspect, provided herein is a vector comprising the isolated nucleic acid molecule. In another related aspect provided herein is a method of producing an antibody or an activatable antibody by culturing a cell under conditions that lead to expression of the antibody or the activatable antibody, wherein the cell comprises the nucleic acid molecules or the vectors provided herein.

[0013] In another aspect, provided herein is a method of manufacturing an activatable antibody that, in an activated state, binds CD147, the method comprising: (a) culturing a cell comprising a nucleic acid construct that encodes the activatable antibody under conditions that lead to the expression of any one of the activatable antibodies described herein, and (b) recovering the activatable antibody.

[0014] In another aspect, provided herein is a method of treating, alleviating a symptom of, or delaying the progression of a disorder or disease in which diseased cells express CD147 comprising administering a therapeutically effective amount of any one of the antibodies, conjugated antibodies, activatable antibodies, conjugated activatable antibodies provided herein, or pharmaceutical compositions of the same to a subject in need thereof. In another aspect, provided herein is a method of treating, alleviating a symptom of, or delaying the progression of a disorder or disease associated with cells expressing CD147 comprising administering a therapeutically effective amount of any one of the antibodies, conjugated antibodies, activatable antibodies, conjugated activatable antibodies provided herein, or pharmaceutical compositions of the same to a subject in need thereof. In some embodiments the disorder or disease is cancer. In some embodiments, the cancer is an adenocarcinoma, a bile duct (biliary) cancer, a bladder cancer, a bone cancer, a breast cancer, a triple-negative breast cancer, a Her2-negative breast cancer, a carcinoid cancer, a cervical cancer, a cholangiocarcinoma, a colorectal cancer, a colon cancer, an endometrial cancer, an esophageal cancer, a glioma, a head and neck cancer, a head and neck squamous cell cancer, a leukemia, a liver cancer, a lung cancer, a non-small cell lung cancer, a small cell lung cancer, a lymphoma, a melanoma, an oropharyngeal cancer, an ovarian cancer, a pancreatic cancer, a prostate cancer, a metastatic castration-resistant prostate carcinoma, a renal cancer, a sarcoma, a skin cancer, a squamous cell cancer, a stomach cancer, a testis cancer, a thyroid cancer, a urogenital cancer, or a urothelial cancer. In another aspect, provided herein is a method of inhibiting or reducing the growth, proliferation, or metastasis of cells expressing CD147 comprising administering a therapeutically effective amount of any one of the antibodies, conjugated antibodies, activatable antibodies, conjugated activatable antibodies provided herein, or pharmaceutical compositions of the same to a subject in need thereof. In some embodiments, the expression and/or activity of the CD147 is aberrant. In another aspect, provided herein is a method of inhibiting, blocking, or preventing the binding of a natural ligand to CD147, comprising administering a therapeutically effective amount of any one of the antibodies, conjugated antibodies, activatable antibodies, conjugated activatable antibodies provided herein, or pharmaceutical compositions of the same to a subject in need thereof. In some embodiments, the expression and/or activity of the CD147 is aberrant. In any of the methods provided herein comprising administering any one of the antibodies, conjugated antibodies, activatable antibodies, conjugated activatable antibodies provided herein, or pharmaceutical compositions of the same to a subject in need thereof, the method can comprise administering an additional agent. In some embodiments, the additional agent is a therapeutic agent.

### BRIEF DESCRIPTION OF THE DRAWINGS

[0015] FIG. 1 is a graph depicting the ability of mouse and humanized anti-human CD147 antibodies of the disclosure to bind human CD147.

[0016] FIG. 2 is a graph depicting the ability of humanized anti-human CD147 antibodies of the disclosure to bind human CD147.

[0017] FIG. 3A-3H are graphs depicting the in vitro cytotoxicity of conjugated anti-human CD147 antibodies of the disclosure.

[0018] FIG. 4 is a schematic representation of the screening and sorting of masking peptides of the disclosure.

[0019] FIG. 5 is a graph depicting the affinity of bacterial surface-displayed masking peptides of the disclosure to an anti-human CD147 antibody of the disclosure.

[0020] FIGS. 6A and 6B are graphs depicting exemplary assays of the relative binding affinity of activatable anti-human CD147 antibodies of the disclosure compared to the unmasked parental anti-human CD147 antibody of the disclosure.

[0021] FIGS. 7A, 7B, and 7C are graphs depicting the relative binding affinity of activatable anti-human CD147 antibodies of the disclosure compared to the unmasked parental anti-human CD147 antibody of the disclosure.

[0022] FIGS. 8A to 8D show exemplary immunohistochemical assay results of anti-human CD147 antibodies of the disclosure to various cancer-derived tissues.

[0023] FIG. 9 is a graph depicting exemplary studies of the ability of anti-human CD147 antibodies of the disclosure to bind human CD147 on various human-derived cell lines and the cytotoxicity of anti-human CD147 antibody drug conjugates of the disclosure to the various human-derived cell lines.

[0024] FIG. 10 is a graph depicting an exemplary binding affinity study of anti-human CD147 antibodies of the disclosure to human and cynomolgus cell lines.

[0025] FIG. 11A is a graph depicting an exemplary binding affinity study of intact and protease-activated anti-human CD147 activatable antibody drug conjugates of the disclosure to human cell lines.

[0026] FIG. 11B is a graph depicting an exemplary in vitro cytotoxicity study of intact and protease-activated anti-human CD147 activatable antibody drug conjugates of the disclosure to a cancer-derived cell line.

[0027] FIGS. 12A and 12B are graphs depicting exemplary in vivo efficacy studies of anti-human CD147 activatable antibody drug conjugates of the disclosure in a xenograft model.

[0028] FIGS. 13A to 13D shows an exemplary toxicology study that cynomolgus monkeys that received a conjugated activatable anti-human CD147 antibody of the disclosure (anti-huCD147 3A11-440.1-2012 DM4) showed no or lower evidence of hematological toxicity (based on neutrophil, reticulocyte, and monocytes counts) or liver toxicity (based on levels of alanine transaminase (ALT)) as compared to a corresponding conjugated anti-human CD147 antibody of the disclosure (anti-huCD147 3A11 DM4).

[0029] FIG. 14 is a graph depicting an exemplary pharmacokinetics study of a conjugated activatable anti-human CD147 antibody of the disclosure and a conjugated parental anti-human CD147 antibody of the disclosure when administered to cynomolgus monkeys.

[0030] FIGS. 15A and 15B are graphs depicting an exemplary tolerability study of a conjugated activatable anti-human CD147 antibody of the disclosure and a conjugated parental anti-human CD147 antibody of the disclosure in cynomolgus monkeys by monitoring alanine transaminase levels and neutrophil counts in cynomolgus monkeys to which the conjugated antibodies were administered.

[0031] FIG. 16 is a graph depicting the ability of humanized anti-human CD147 antibodies of the disclosure to bind both glycosylated and deglycosylated human CD147 fusion protein.

### DETAILED DESCRIPTION OF THE INVENTION

[0032] CD147 (also known as Basigin, extracellular matrix metalloproteinase inducer (EMMPRIN), gp42, BSG, HT7, neurothelin, OX-47, M6, and 5A11) is a transmembrane glycoprotein that that belongs to the immunoglobulin superfamily and plays essential roles in intercellular communication. (The use of the term “CD147” is intended to cover any variation thereof, such as, by way of non-limiting example, CD-147 and/or CD 147, and all variations are used herein interchangeably.) CD147 is the receptor for cyclophilins A and B, S100A9 and platelet glycoprotein VI, whereas CD147 serves as the receptor for the rod-derived cone viability factor. CD147 associates with monocarboxylate transporters and is essential for their cell surface translocation and activities. CD147 also interacts with several integrins. In the same membrane plane, CD147 also associates with other proteins including GLUT1, CD44 and CD98. The carbohydrate portion of CD147 is recognized by lectins, such as galectin-3 and E-selectin. These molecular recognitions form the basis for the role of CD147 in the transport of nutrients, migration of inflammatory leukocytes and induction of matrix metalloproteinases (MMPs). CD147 plays roles in vision, spermatogenesis and other physiological phenomena, and also plays roles in the pathogenesis of numerous diseases, including cancer. CD147 is also the receptor for an invasive protein RH5, which is present in malaria parasites.

[0033] CD147 has a broad expression pattern on hematopoietic and non-hematopoietic cells such as monocytes, granulocytes, epithelial and endothelial cells. CD147 is upregulated on active T-lymphocytes. Some CD147 antibodies, to specific epitopes, inhibit proliferation induced by a CD3 mAb.

[0034] CD147 is desirable target because it is prevalent across multiple cancer indications.

[0035] Accordingly, the present disclosure provides antibodies, activatable antibodies, conjugated antibodies, and conjugated activatable antibodies that specifically bind mammalian CD147, methods of making and use thereof.

[0036] More specifically, the disclosure provides anti-mammalian CD147 antibodies and fragments thereof (interchangeably referred to herein as CD147 antibodies, or ABs), conjugated CD147 antibodies, activatable CD147 antibodies, and conjugated activatable CD147 antibodies that are useful in methods of treating, preventing, delaying the progression of, ameliorating and/or alleviating a symptom of a disease or disorder associated with cells expressing CD147. In some embodiments, the cells are associated with normal CD147 expression and/or activity. In some embodiments, the cells are associated with aberrant CD147 expression and/or activity. In some embodiments, the cells are associated with CD147 expression and/or activity in diseased cells. For example, any of the antibodies/activatable antibodies described herein can be used in methods of treating, preventing, delaying the progression of, ameliorating and/or alleviating a symptom of a cancer or other neoplastic condition. Any of the antibodies/activatable antibodies described herein can also be used for detection/diagnostic applications.

[0037] In some embodiments the antibodies and activatable antibodies specifically bind human CD147 and cynomolgus monkey CD147. In some embodiments, the antibodies and activatable antibodies bind human CD147. In some embodiments, the antibodies and activatable antibodies bind cynomolgus monkey CD147. In some embodiments, the antibodies and activatable antibodies are internalized by CD147-containing cells. In some embodiments, the antibodies and activatable antibodies bind both the glycosylated and deglycosylated forms of the CD147 antigen.

### Definitions

[0038] Unless otherwise defined, scientific and technical terms used in connection with the present disclosure shall have the meanings that are commonly understood by those of ordinary skill in the art. The term “a” entity or “an” entity refers to one or more of that entity. For example, a compound refers to one or more compounds. As such, the terms “a”, “an”, “one or more” and “at least one” can be used interchangeably. Further, unless otherwise required by context, singular terms shall include pluralities and plural terms shall include the singular. Generally, nomenclatures utilized in connection with, and techniques of, cell and tissue culture, molecular biology, and protein and oligo- or polynucleotide chemistry and hybridization described herein are those well-known and commonly used in the art. Standard techniques are used for recombinant DNA, oligonucleotide synthesis, and tissue culture and transformation (e.g., electroporation, lipofection). Enzymatic reactions and purification techniques are performed according to manufacturer's specifications or as commonly accomplished in the art or as described herein. The foregoing techniques and procedures are generally performed according to conventional methods well known in the art and as described in various general and more specific references that are cited and discussed throughout the present specification. See e.g., Sambrook et al. Molecular Cloning: A Laboratory Manual (2d ed., Cold Spring Harbor Laboratory Press, Cold Spring Harbor, N.Y. (1989)). The nomenclatures utilized in connection with, and the laboratory procedures and techniques of, analytical chemistry, synthetic organic chemistry, and medicinal and pharmaceutical chemistry described herein are those well-known and commonly used in the art. Standard techniques are used for chemical syntheses, chemical analyses, pharmaceutical preparation, formulation, and delivery, and treatment of patients.

[0039] As utilized in accordance with the present disclosure, the following terms, unless otherwise indicated, shall be understood to have the following meanings:

[0040] As used herein, the term “antibody” refers to immunoglobulin molecules and immunologically active portions of immunoglobulin (Ig) molecules, i.e., molecules that contain an antigen binding site that specifically binds (immunoreacts with) an antigen. By “specifically bind” or “immunoreacts with” or “immunospecifically bind” is meant that the antibody reacts with one or more antigenic determinants of the desired antigen and does not react with other polypeptides or binds at much lower affinity (K_{d}>10⁻⁶). Antibodies include, but are not limited to, polyclonal, monoclonal, chimeric, domain antibody, single chain, Fab, and F(ab′)2 fragments, scFvs, and an Fab expression library. The antibodies provided herein can be of any of the IgG, IgM, IgA, IgE and IgD classes (or subclasses thereof).

[0041] The term “monoclonal antibody” (mAb) or “monoclonal antibody composition”, as used herein, refers to a population of antibody molecules that contain only one molecular species of antibody molecule consisting of a unique light chain gene product and a unique heavy chain gene product. In particular, the complementarity determining regions (CDRs) of the monoclonal antibody are identical in all the molecules of the population. MAbs contain an antigen binding site capable of immunoreacting with a particular epitope of the antigen characterized by a unique binding affinity for it.

[0042] The term “antigen-binding site” or “binding portion” refers to the part of the immunoglobulin molecule that participates in antigen binding. The antigen binding site is formed by amino acid residues of the N-terminal variable (“V”) regions of the heavy (“H”) and light (“L”) chains. Three highly divergent stretches within the V regions of the heavy and light chains, referred to as “hypervariable regions,” are interposed between more conserved flanking stretches known as “framework regions,” or “FRs”. Thus, the term “FR” refers to amino acid sequences that are naturally found between, and adjacent to, hypervariable regions in immunoglobulins. In an antibody molecule, the three hypervariable regions of a light chain and the three hypervariable regions of a heavy chain are disposed relative to each other in three dimensional space to form an antigen-binding surface. The antigen-binding surface is complementary to the three-dimensional surface of a bound antigen, and the three hypervariable regions of each of the heavy and light chains are referred to as “complementarity-determining regions,” or “CDRs.” The assignment of amino acids to each domain is in accordance with the definitions of Kabat Sequences of Proteins of Immunological Interest (National Institutes of Health, Bethesda, Md. (1987 and 1991)), or Chothia & Lesk J. Mol. Biol. 196:901-917 (1987), Chothia et al. Nature 342:878-883 (1989).

[0043] As used herein, the term “epitope” includes any protein determinant capable of specific binding to an immunoglobulin, a scFv, or a T-cell receptor. The term “epitope” includes any protein determinant capable of specific binding to an immunoglobulin or T-cell receptor. Epitopic determinants usually consist of chemically active surface groupings of molecules such as amino acids or sugar side chains and usually have specific three dimensional structural characteristics, as well as specific charge characteristics. For example, antibodies can be raised against N-terminal or C-terminal peptides of a polypeptide. An antibody is said to specifically bind an antigen when the dissociation constant is ≤1 μM; in some embodiments, ≤100 nM and in some embodiments, ≤10 nM.

[0044] As used herein, the terms “specific binding,” “immunological binding,” and “immunological binding properties” refer to the non-covalent interactions of the type which occur between an immunoglobulin molecule and an antigen for which the immunoglobulin is specific. The strength, or affinity of immunological binding interactions can be expressed in terms of the dissociation constant (K_{d}) of the interaction, wherein a smaller K_{d} represents a greater affinity. Immunological binding properties of selected polypeptides can be quantified using methods well known in the art. One such method entails measuring the rates of antigen-binding site/antigen complex formation and dissociation, wherein those rates depend on the concentrations of the complex partners, the affinity of the interaction, and geometric parameters that equally influence the rate in both directions. Thus, both the “on rate constant” (Kₒₙ) and the “off rate constant” (K_{off}) can be determined by calculation of the concentrations and the actual rates of association and dissociation. (See Nature 361:185-87 (1993)). The ratio of K_{off}/Kₒₙ enables the cancellation of all parameters not related to affinity, and is equal to the dissociation constant K_{d}. (See, generally, Davies et al. (1990) Annual Rev Biochem 59:439-473). An antibody of the present disclosure is said to specifically bind to the target, when the binding constant (K_{d}) is ≤1 μM, in some embodiments ≤100 nM, in some embodiments ≤10 nM, and in some embodiments ≤100 pM to about 1 pM, as measured by assays such as radioligand binding assays or similar assays known to those skilled in the art.

[0045] The term “isolated polynucleotide” as used herein shall mean a polynucleotide of genomic, cDNA, or synthetic origin or some combination thereof, which by virtue of its origin the “isolated polynucleotide” (1) is not associated with all or a portion of a polynucleotide in which the “isolated polynucleotide” is found in nature, (2) is operably linked to a polynucleotide which it is not linked to in nature, or (3) does not occur in nature as part of a larger sequence. Polynucleotides in accordance with the disclosure include the nucleic acid molecules encoding the heavy chain immunoglobulin molecules shown herein, and nucleic acid molecules encoding the light chain immunoglobulin molecules shown herein.

[0046] The term “isolated protein” referred to herein means a protein of cDNA, recombinant RNA, or synthetic origin or some combination thereof, which by virtue of its origin, or source of derivation, the “isolated protein” (1) is not associated with proteins found in nature, (2) is free of other proteins from the same source, e.g., free of murine proteins, (3) is expressed by a cell from a different species, or (4) does not occur in nature.

[0047] The term “polypeptide” is used herein as a generic term to refer to native protein, fragments, or analogs of a polypeptide sequence. Hence, native protein fragments, and analogs are species of the polypeptide genus. Polypeptides in accordance with the disclosure comprise the heavy chain immunoglobulin molecules shown herein, and the light chain immunoglobulin molecules shown herein, as well as antibody molecules formed by combinations comprising the heavy chain immunoglobulin molecules with light chain immunoglobulin molecules, such as kappa light chain immunoglobulin molecules, and vice versa, as well as fragments and analogs thereof.

[0048] The term “naturally-occurring” as used herein as applied to an object refers to the fact that an object can be found in nature. For example, a polypeptide or polynucleotide sequence that is present in an organism (including viruses) that can be isolated from a source in nature and that has not been intentionally modified by man in the laboratory or otherwise is naturally-occurring.

[0049] The term “operably linked” as used herein refers to positions of components so described are in a relationship permitting them to function in their intended manner. A control sequence “operably linked” to a coding sequence is ligated in such a way that expression of the coding sequence is achieved under conditions compatible with the control sequences.

[0050] The term “control sequence” as used herein refers to polynucleotide sequences that are necessary to effect the expression and processing of coding sequences to which they are ligated. The nature of such control sequences differs depending upon the host organism in prokaryotes, such control sequences generally include promoter, ribosomal binding site, and transcription termination sequence in eukaryotes, generally, such control sequences include promoters and transcription termination sequence. The term “control sequences” is intended to include, at a minimum, all components whose presence is essential for expression and processing, and can also include additional components whose presence is advantageous, for example, leader sequences and fusion partner sequences. The term “polynucleotide” as referred to herein means nucleotides of at least 10 bases in length, either ribonucleotides or deoxynucleotides or a modified form of either type of nucleotide. The term includes single and double stranded forms of DNA.

[0051] The term oligonucleotide referred to herein includes naturally occurring, and modified nucleotides linked together by naturally occurring, and non-naturally occurring oligonucleotide linkages. Oligonucleotides are a polynucleotide subset generally comprising a length of 200 bases or fewer. In some embodiments, oligonucleotides are 10 to 60 bases in length and in some embodiments, 12, 13, 14, 15, 16, 17, 18, 19, or 20 to 40 bases in length. Oligonucleotides are usually single stranded, e.g., for probes, although oligonucleotides may be double stranded, e.g., for use in the construction of a gene mutant. Oligonucleotides of the disclosure are either sense or antisense oligonucleotides.

[0052] The term “naturally occurring nucleotides” referred to herein includes deoxyribonucleotides and ribonucleotides. The term “modified nucleotides” referred to herein includes nucleotides with modified or substituted sugar groups and the like. The term “oligonucleotide linkages” referred to herein includes oligonucleotide linkages such as phosphorothioate, phosphorodithioate, phosphoroselerloate, phosphorodiselenoate, phosphoroanilothioate, phoshoraniladate, phosphoronmidate, and the like. See e.g., LaPlanche et al. Nucl. Acids Res. 14:9081 (1986); Stec et al. J. Am. Chem. Soc. 106:6077 (1984), Stein et al. Nucl. Acids Res. 16:3209 (1988), Zon et al. Anti Cancer Drug Design 6:539 (1991); Zon et al. Oligonucleotides and Analogues: A Practical Approach, pp. 87-108 (F. Eckstein, Ed., Oxford University Press, Oxford England (1991)); Stec et al. U.S. Pat. No. 5,151,510; Uhlmann and Peyman Chemical Reviews 90:543 (1990). An oligonucleotide can include a label for detection, if desired.

[0053] As used herein, the twenty conventional amino acids and their abbreviations follow conventional usage. See Immunology—A Synthesis (2nd Edition, E. S. Golub and D. R. Green, Eds., Sinauer Associates, Sunderland, Mass. (1991)). Stereoisomers (e.g., D-amino acids) of the twenty conventional amino acids, unnatural amino acids such as α-, α-disubstituted amino acids, N-alkyl amino acids, lactic acid, and other unconventional amino acids may also be suitable components for polypeptides of the present disclosure. Examples of unconventional amino acids include: 4 hydroxyproline, γ-carboxyglutamate, ε-N,N,N-trimethyllysine, ε-N-acetyllysine, O-phosphoserine, N-acetylserine, N-formylmethionine, 3-methylhistidine, 5-hydroxylysine, σ-N-methylarginine, and other similar amino acids and imino acids (e.g., 4-hydroxyproline). In the polypeptide notation used herein, the left-hand direction is the amino terminal direction and the right-hand direction is the carboxy-terminal direction, in accordance with standard usage and convention.

[0054] Similarly, unless specified otherwise, the left-hand end of single-stranded polynucleotide sequences is the 5′ end the left-hand direction of double-stranded polynucleotide sequences is referred to as the 5′ direction. The direction of 5′ to 3′ addition of nascent RNA transcripts is referred to as the transcription direction sequence regions on the DNA strand having the same sequence as the RNA and that are 5′ to the 5′ end of the RNA transcript are referred to as “upstream sequences”, sequence regions on the DNA strand having the same sequence as the RNA and that are 3′ to the 3′ end of the RNA transcript are referred to as “downstream sequences”.

[0055] As applied to polypeptides, the term “substantial identity” means that two peptide sequences, when optimally aligned, such as by the programs GAP or BESTFIT using default gap weights, share at least 80 percent sequence identity, in some embodiments, at least 90 percent sequence identity, in some embodiments, at least 95 percent sequence identity, and in some embodiments, at least 99 percent sequence identity.

[0056] In some embodiments, residue positions that are not identical differ by conservative amino acid substitutions.

[0057] As discussed herein, minor variations in the amino acid sequences of antibodies or immunoglobulin molecules are contemplated as being encompassed by the present disclosure, providing that the variations in the amino acid sequence maintain at least 75%, in some embodiments, at least 80%, 90%, 95%, and in some embodiments, 99%. In particular, conservative amino acid replacements are contemplated. Conservative replacements are those that take place within a family of amino acids that are related in their side chains. Genetically encoded amino acids are generally divided into families: (1) acidic amino acids are aspartate, glutamate; (2) basic amino acids are lysine, arginine, histidine; (3) non-polar amino acids are alanine, valine, leucine, isoleucine, proline, phenylalanine, methionine, tryptophan, and (4) uncharged polar amino acids are glycine, asparagine, glutamine, cysteine, serine, threonine, tyrosine. The hydrophilic amino acids include arginine, asparagine, aspartate, glutamine, glutamate, histidine, lysine, serine, and threonine. The hydrophobic amino acids include alanine, cysteine, isoleucine, leucine, methionine, phenylalanine, proline, tryptophan, tyrosine and valine. Other families of amino acids include (i) serine and threonine, which are the aliphatic-hydroxy family; (ii) asparagine and glutamine, which are the amide containing family; (iii) alanine, valine, leucine and isoleucine, which are the aliphatic family; and (iv) phenylalanine, tryptophan, and tyrosine, which are the aromatic family. For example, it is reasonable to expect that an isolated replacement of a leucine with an isoleucine or valine, an aspartate with a glutamate, a threonine with a serine, or a similar replacement of an amino acid with a structurally related amino acid will not have a major effect on the binding or properties of the resulting molecule, especially if the replacement does not involve an amino acid within a framework site. Whether an amino acid change results in a functional peptide can readily be determined by assaying the specific activity of the polypeptide derivative. Assays are described in detail herein. Fragments or analogs of antibodies or immunoglobulin molecules can be readily prepared by those of ordinary skill in the art. Suitable amino- and carboxy-termini of fragments or analogs occur near boundaries of functional domains. Structural and functional domains can be identified by comparison of the nucleotide and/or amino acid sequence data to public or proprietary sequence databases. In some embodiments, computerized comparison methods are used to identify sequence motifs or predicted protein conformation domains that occur in other proteins of known structure and/or function. Methods to identify protein sequences that fold into a known three-dimensional structure are known. Bowie et al. Science 253:164 (1991). Thus, the foregoing examples demonstrate that those of skill in the art can recognize sequence motifs and structural conformations that can be used to define structural and functional domains in accordance with the disclosure.

[0058] Suitable amino acid substitutions are those that: (1) reduce susceptibility to proteolysis, (2) reduce susceptibility to oxidation, (3) alter binding affinity for forming protein complexes, (4) alter binding affinities, and (5) confer or modify other physicochemical or functional properties of such analogs. Analogs can include various muteins of a sequence other than the naturally-occurring peptide sequence. For example, single or multiple amino acid substitutions (for example, conservative amino acid substitutions) can be made in the naturally-occurring sequence (for example, in the portion of the polypeptide outside the domain(s) forming intermolecular contacts. A conservative amino acid substitution should not substantially change the structural characteristics of the parent sequence (e.g., a replacement amino acid should not tend to break a helix that occurs in the parent sequence, or disrupt other types of secondary structure that characterizes the parent sequence). Examples of art-recognized polypeptide secondary and tertiary structures are described in Proteins, Structures and Molecular Principles (Creighton, Ed., W. H. Freeman and Company, New York (1984)); Introduction to Protein Structure (C. Branden and J. Tooze, eds., Garland Publishing, New York, N.Y. (1991)); and Thornton et at. Nature 354:105 (1991).

[0059] The term “polypeptide fragment” as used herein refers to a polypeptide that has an amino terminal and/or carboxy-terminal deletion and/or one or more internal deletion(s), but where the remaining amino acid sequence is identical to the corresponding positions in the naturally-occurring sequence deduced, for example, from a full length cDNA sequence. Fragments typically are at least 5, 6, 8 or 10 amino acids long, in some embodiments, at least 14 amino acids long, in some embodiments, at least 20 amino acids long, usually at least 50 amino acids long, and in some embodiments, at least 70 amino acids long. The term “analog” as used herein refers to polypeptides that are comprised of a segment of at least 25 amino acids that has substantial identity to a portion of a deduced amino acid sequence and that has specific binding to the target, under suitable binding conditions. Typically, polypeptide analogs comprise a conservative amino acid substitution (or addition or deletion) with respect to the naturally-occurring sequence. Analogs typically are at least 20 amino acids long, in some embodiments, at least 50 amino acids long or longer, and can often be as long as a full-length naturally-occurring polypeptide.

[0060] The term “agent” is used herein to denote a chemical compound, a mixture of chemical compounds, a biological macromolecule, or an extract made from biological materials.

[0061] As used herein, the terms “label” or “labeled” refers to incorporation of a detectable marker, e.g., by incorporation of a radiolabeled amino acid or attachment to a polypeptide of biotinyl moieties that can be detected by marked avidin (e.g., streptavidin containing a fluorescent marker or enzymatic activity that can be detected by optical or calorimetric methods). In certain situations, the label or marker can also be therapeutic. Various methods of labeling polypeptides and glycoproteins are known in the art and can be used. Examples of labels for polypeptides include, but are not limited to, the following: radioisotopes or radionuclides (e.g., ³H, ¹⁴C, ¹⁵N, ³⁵S, ⁹⁰Y, ⁹⁹Tc, ¹¹¹In, ¹²⁵I, ¹³¹I), fluorescent labels (e.g., FITC, rhodamine, lanthanide phosphors), enzymatic labels (e.g., horseradish peroxidase, p-galactosidase, luciferase, alkaline phosphatase), chemiluminescent, biotinyl groups, predetermined polypeptide epitopes recognized by a secondary reporter (e.g., leucine zipper pair sequences, binding sites for secondary antibodies, metal binding domains, epitope tags). In some embodiments, labels are attached by spacer arms of various lengths to reduce potential steric hindrance. The term “pharmaceutical agent or drug” as used herein refers to a chemical compound or composition capable of inducing a desired therapeutic effect when properly administered to a patient.

[0062] Other chemistry terms herein are used according to conventional usage in the art, as exemplified by The McGraw-Hill Dictionary of Chemical Terms (Parker, S., Ed., McGraw-Hill, San Francisco (1985)).

[0063] As used herein, “substantially pure” means an object species is the predominant species present (i.e., on a molar basis it is more abundant than any other individual species in the composition), and in some embodiments, a substantially purified fraction is a composition wherein the object species comprises at least about 50 percent (on a molar basis) of all macromolecular species present.

[0064] Generally, a substantially pure composition will comprise more than about 80 percent of all macromolecular species present in the composition, in some embodiments, more than about 85%, 90%, 95%, and 99%. In some embodiments, the object species is purified to essential homogeneity (contaminant species cannot be detected in the composition by conventional detection methods) wherein the composition consists essentially of a single macromolecular species.

[0065] The term patient includes human and veterinary subjects.

[0066] CD147 Antibodies

[0067] Provided herein are antibodies and antigen binding fragments thereof (ABs) that specifically bind to mammalian CD147. In some embodiments, the AB specifically binds human CD147 and cynomolgus monkey CD147.

[0068] The ABs provided herein that bind CD147 includes a monoclonal antibody, a domain antibody, a single chain antibody, a Fab fragment, a F(ab′)2 fragment, a scFv, a scAb, a dAb, a single domain heavy chain antibody, or a single domain light chain antibody. In some embodiments, such an ABs that binds CD147 is a mouse, other rodent, chimeric, humanized or fully human monoclonal antibody.

[0069] Also provided herein are activatable CD147 antibodies that include an antibody or antigen-binding fragment thereof (AB) that specifically binds CD147 coupled to a masking moiety (MM), such that coupling of the MM reduces the ability of the antibody or antigen-binding fragment thereof to bind CD147. In some embodiments, the MM is coupled via a sequence that includes a substrate for a protease (cleavable moiety, CM), for example, a protease that is co-localized with CD147 at a treatment site in a subject. (The activatable CD147 antibodies of the disclosure are described in greater detail in a below section).

[0070] The CD147 antibodies of the disclosure specifically bind a mammalian CD147 target, such as, for example, human CD147. Also included in the disclosure are CD147 antibodies and ABs that bind to the same CD147 epitope as an antibody of the disclosure and/or an activated activatable antibody described herein. Also included in the disclosure are CD147 antibodies compete with a CD147 antibody described herein for binding to a CD147 target, e.g., human CD147. Also included in the disclosure are CD147 antibodies that cross-compete with (inhibit the binding of) a CD147 antibody and/or an activated CD147 activatable antibody described herein for binding to a CD147 target, e.g., human CD147.

[0071] Antibodies and/or activatable antibodies of the disclosure specifically bind a mammalian CD147, e.g. human CD147 and cynomologous CD147. Also included in the disclosure are antibodies and/or activatable antibodies that bind to the same epitope as any of the antibodies and/or activatable antibodies described herein. Also included in the disclosure are antibodies and/or antibodies activatable antibodies that compete with a CD147 antibody (inhibit the binding of) and/or a CD147 activatable antibody described herein for binding to CD147, e.g., human CD147. Also included in the disclosure are antibodies and/or antibodies activatable antibodies that cross-compete with a CD147 antibody and/or a CD147 activatable antibody described herein for binding to CD147 (inhibits the binding to CD147), e.g., human CD147.

[0072] In some embodiments, the mammalian CD147 is selected from the group consisting of a human CD147, a murine CD147, a rat CD147, and a cynomolgus monkey CD147. In some embodiments, the AB specifically binds to human CD147, murine CD147 or cynomolgus monkey CD147 with a dissociation constant of less than 1 nM. In some embodiments, the mammalian CD147 is a human CD147.

[0073] In some embodiments, the AB has one or more of the following characteristics: (a) the AB specifically binds to human CD147; and (b) the AB specifically binds to human CD147 and cynomolgus monkey CD147.

[0074] In some embodiments, the AB has one or more of the following characteristics: (a) the AB specifically binds human CD147 and cynomolgus monkey CD147; (b) the AB inhibits binding of one or more of the natural mammalian ligands of CD147 to mammalian CD147; (c) the AB inhibits binding of one or more of the natural human ligands of CD147 to human CD147; and (d) the AB inhibits binding of one or more of the natural cynomolgus monkey ligands of CD147 to cynomolgus monkey CD147.

[0075] In some embodiments the AB binds both glycosylated and deglycosylated forms of CD147.

[0076] In some embodiments, the AB blocks the ability of a natural ligand to bind to the mammalian CD147 with an EC₅₀ less than or equal to 5 nM, less than or equal to 10 nM, less than or equal to 50 nM, less than or equal to 100 nM, less than or equal to 500 nM, and/or less than or equal to 1000 nM. In some embodiments, the AB blocks the ability of a natural ligand to bind to the mammalian CD147 with an EC₅₀ less than or equal to 5 nM, less than or equal to 10 nM, less than or equal to 50 nM, less than or equal to 100 nM, less than or equal to 500 nM, and/or less than or equal to 1000 nM.

[0077] In some embodiments, the AB blocks the ability of a natural ligand to bind to the mammalian CD147 with an EC₅₀ of 5 nM to 1000 nM, 5 nM to 500 nM, 5 nM to 100 nM 5 nM to 50 nM, 5 nM to 10 nM, 10 nM to 1000 nM, 10 nM to 500 nM, 10 nM to 100 nM 10 nM to 50 nM, 50 nM to 1000 nM, 50 nM to 500 nM, 50 nM to 100 nM, 100 nM to 1000 nM, 100 nM to 500 nM, 500 nM to 1000 nM. In some embodiments, the AB blocks the ability of a natural ligand to bind to the mammalian CD147 with an EC₅₀ of 5 nM to 1000 nM, 5 nM to 500 nM, 5 nM to 100 nM 5 nM to 50 nM, 5 nM to 10 nM, 10 nM to 1000 nM, 10 nM to 500 nM, 10 nM to 100 nM 10 nM to 50 nM, 50 nM to 1000 nM, 50 nM to 500 nM, 50 nM to 100 nM, 100 nM to 1000 nM, 100 nM to 500 nM, 500 nM to 1000 nM.

[0078] In some embodiments, the AB of the present disclosure inhibits or reduces the growth, proliferation, and/or metastasis of cells expressing mammalian CD147. Without intending to be bound by any theory, the AB of the present disclosure may inhibit or reduce the growth, proliferation, and/or metastasis of cells expressing mammalian CD147 by specifically binding to CD147 and inhibiting, blocking, and/or preventing the binding of a natural ligand to mammalian CD147.

[0079] In some embodiments, the AB has a dissociation constant of about 100 nM or less for binding to mammalian CD147. In some embodiments, the AB has a dissociation constant of about 10 nM or less for binding to mammalian CD147. In some embodiments, the AB has a dissociation constant of about 5 nM or less for binding to CD147. In some embodiments, the AB has a dissociation constant of about 1 nM or less for binding to CD147. In some embodiments, the AB has a dissociation constant of about 0.5 nM or less for binding to CD147. In some embodiments, the AB has a dissociation constant of about 0.1 nM or less for binding to CD147. In some embodiments, the AB has a dissociation constant of 0.01 nM to 100 nM, 0.01 nM to 10 nM, 0.01 nM to 5 nM, 0.01 nM to 1 nM, 0.01 to 0.5 nM, 0.01 nm to 0.1 nM, 0.01 nm to 0.05 nM, 0.05 nM to 100 nM, 0.05 nM to 10 nM, 0.05 nM to 5 nM, 0.05 nM to 1 nM, 0.05 to 0.5 nM, 0.05 nm to 0.1 nM, 0.1 nM to 100 nM, 0.1 nM to 10 nM, 0.1 nM to 5 nM, 0.1 nM to 1 nM, 0.1 to 0.5 nM, 0.5 nM to 100 nM, 0.5 nM to 10 nM, 0.5 nM to 5 nM, 0.5 nM to 1 nM, 1 nM to 100 nM, 1 nM to 10 nM, 1 nM to 5 nM, 5 nM to 100 nM, 5 nM to 10 nM, or 10 nM to 100 nM, for binding to mammalian CD147.

[0080] Exemplary CD147 antibodies and activatable CD147 antibodies of the invention may include a heavy chain and a light chain that are, or are derived from, the heavy chain variable and light chain variable sequences shown below (CDR sequences are shown in bold and underline):

mu 3A11 VH:

(SEQ ID NO: 4)

EVKLEESGGGLVQPGGSMKLSCVASGFTFSNYWMNWVRQSPEKGLEWVGE
IRLKSYNyATHYVESVEGRFTISRDDSKSSVYLQMNNLRAEDTGIYYCTA
AGTDYWGQGTTLTVSS
mu 3A11 VL:

(SEQ ID NO: 9)

SIVMTQIPKILLVSAGDRVTITCKASQSVRTDVAWYQQKPGQSPKLLIYY
SSNRYTGVPDRFTGSGYGTDFTFTISTVQAEDLAVYFCQQDYSSPFTFGS
GTKLEIK
3A11 hu Hc1

(SEQ ID NO: 1)

EVQLVESGGGLVQPGGSLRLSCAASGFTFSNYWMDWVRQAPGKGLEWVGE
IRLKSYNYATHYAASVKGRFTISRDDSKNSVYLQMNSLKTEDTAVYYCTA
AGTDYWGQGTLVTVSS
3A11 hu Hc2

(SEQ ID NO: 2)

EVQLVESGGGLVQPGGSLRLSCAASGFTFSNYWMNWVRQAPGKGLEWVGE
IRLKSYNYATHYAASVKGRFTISRDDSKNSLYLQMNSLKTEDTAVYYCAR
AGTDYWGQGTLVTVSS
3A11 hu Hc3

(SEQ ID NO: 3)

EVQLVESGGGLVQPGGSLRLSCAASGFTFSNYWMNWVRQAPGKGLEWVGE
IRLKSYNYATHYVASVKGRFTISRDDSKNSVYLQMNSLKTEDTAVYYCTA
AGTDYWGQGTLLTVSS
3A11 hu Lc1

(SEQ ID NO: 5)

DIQMTQSPSSLSASVGDRVTITCRASQSVRTDVGWYQQKPGKAPKLLIYY
SSNRYTGVPSRFSGSGSGTDFTLTISSLQPEDFATYYCQQDYSSPYTFGQ
GTKLEIK
3A11 hu Lc2

(SEQ ID NO: 6)

DIQMTQSPSSLSASVGDRVTITCKASQSVRTDVAWYQQKPGKAPKLLIYY
SSNRYTGVPSRFSGSGSGTDFTLTISSLQPEDFATYYCQQDYSSPFTFGQ
GTKLEIK
3A11 hu Lc3

(SEQ ID NO: 7)

DIQMTQSPSSLSVSVGDRVTITCKASQSVRTDVAWYQQKPGKAPKLLIYY
SSNRYTGVPSRFSGSGSGTDFTFTISSVQPEDFATYYCQQDYSSPFTFGQ
GTKLEIK
3A11 hu Lc4

(SEQ ID NO: 8)

DIQMTQSPSSLSVSVGDRVTITCKASQSVRTDVAWYQQKPGKAPKLLIYY
SSNRYTGVPSRFSGSGYGTDFTFTISSVQPEDFATYYCQQDYSSPFTFGQ
GTKLEIK

[0081] In some embodiments, the antibody or antigen-binding fragment thereof of the CD147 antibody/activatable antibody comprises a heavy chain variable region amino acid sequence selected from the group consisting of SEQ ID NOs: 1-4. In some embodiments, the antibody or antigen-binding fragment thereof of the CD147 antibody/activatable antibody comprises a heavy chain variable region amino acid sequence selected from the group consisting of SEQ ID NOs: 1-3.

[0082] In some embodiments, the antibody or antigen-binding fragment thereof of the CD147 antibody/activatable antibody comprises a light chain variable region amino acid sequence selected from the group consisting of SEQ ID NOs: 5-9. In some embodiments, the antibody or antigen-binding fragment thereof of the CD147 antibody/activatable antibody comprises a light chain variable region amino acid sequence selected from the group consisting of SEQ ID NOs: 5-8.

[0083] In some embodiments, the antibody or antigen-binding fragment thereof of the CD147 antibody/activatable antibody comprises a heavy chain variable region amino acid sequence selected from the group consisting of SEQ ID NOs: 1-4, and a light chain variable region amino acid sequence selected from the group consisting of SEQ ID NOs: 5-9.

[0084] In some embodiments, the antibody or antigen-binding fragment thereof of the CD147 antibody/activatable antibody comprises a heavy chain variable region amino acid sequence selected from the group consisting of SEQ ID NOs: 1-3, and a light chain variable region amino acid sequence selected from the group consisting of SEQ ID NOs: 5-8.

[0085] In some embodiments, the antibody or antigen-binding fragment thereof of the CD147 antibody/activatable antibody comprises a heavy chain variable region amino acid sequence that is at least 90%, 91%, 92%, 93%, 94%, 95%, 96%, 97%, 98% or 99% identical to an amino acid sequence selected from the group consisting of SEQ ID NOs: 1-4. In some embodiments, the antibody or antigen-binding fragment thereof of the CD147 antibody/activatable antibody comprises a heavy chain variable region amino acid sequence that is at least 90%, 91%, 92%, 93%, 94%, 95%, 96%, 97%, 98% or 99% identical to an amino acid sequence selected from the group consisting of SEQ ID NOs: 1-3.

[0086] In some embodiments, the antibody or antigen-binding fragment thereof of the CD147 antibody/activatable antibody comprises a light chain variable region amino acid sequence that is at least 90%, 91%, 92%, 93%, 94%, 95%, 96%, 97%, 98% or 99% identical to an amino acid sequence selected from the group consisting of SEQ ID NOs: 5-9. In some embodiments, the antibody or antigen-binding fragment thereof of the CD147 antibody/activatable antibody comprises a light chain variable region amino acid sequence that is at least 90%, 91%, 92%, 93%, 94%, 95%, 96%, 97%, 98% or 99% identical to an amino acid sequence selected from the group consisting of SEQ ID NOs: 5-8.

[0087] In some embodiments, the antibody or antigen-binding fragment thereof of the CD147 antibody/activatable antibody comprises a heavy chain variable region amino acid sequence that is at least 90%, 91%, 92%, 93%, 94%, 95%, 96%, 97%, 98% or 99% identical to an amino acid sequence selected from the group consisting of SEQ ID NOs: 1-4, and a light chain variable region amino acid sequence that is at least 90%, 91%, 92%, 93%, 94%, 95%, 96%, 97%, 98% or 99% identical to an amino acid sequence selected from the group consisting of SEQ ID NOs: 5-9.

[0088] In some embodiments, the antibody or antigen-binding fragment thereof of the CD147 antibody/activatable antibody comprises a heavy chain variable region amino acid sequence that is at least 90%, 91%, 92%, 93%, 94%, 95%, 96%, 97%, 98% or 99% identical to an amino acid sequence selected from the group consisting of SEQ ID NOs: 1-3, and a light chain variable region amino acid sequence that is at least 90%, 91%, 92%, 93%, 94%, 95%, 96%, 97%, 98% or 99% identical to an amino acid sequence selected from the group consisting of SEQ ID NOs: 5-8.

[0089] Exemplary CD147 antibodies and activatable CD147 antibodies of the invention include a combination of a variable heavy chain complementarity determining region 1 (VH CDR1, also referred to herein as CDRH1) sequence, a variable heavy chain complementarity determining region 2 (VH CDR2, also referred to herein as CDRH2) sequence, a variable heavy chain complementarity determining region 3 (VH CDR3, also referred to herein as CDRH3) sequence, a variable light chain complementarity determining region 1 (VL CDR1, also referred to herein as CDRL1) sequence, a variable light chain complementarity determining region 2 (VL CDR2, also referred to herein as CDRL2) sequence, and a variable light chain complementarity determining region 3 (VL CDR3, also referred to herein as CDRL3) sequence, wherein at least one CDR sequence is selected from the group consisting of a VH CDR1 sequence comprising the amino acid sequence GFTFSNYWMN (SEQ ID NO: 10) or GFTFSNYWMD (SEQ ID NO: 11); a VH CDR2 sequence comprising the amino acid sequence EIRLKSYNYATH (SEQ ID NO: 12); a VH CDR3 sequence comprising the amino acid sequence AGTDY (SEQ ID NO: 13); a VL CDR1 sequence comprising the amino acid sequence KASQSVRTDVA (SEQ ID NO: 14) or RASQSVRTDVG (SEQ ID NO: 15); a VL CDR2 sequence comprising the amino acid sequence YSSNRYT (SEQ ID NO: 16); and a VL CDR3 sequence comprising the amino acid sequence QQDYSSPFT (SEQ ID NO: 17) or QQDYSSPYT (SEQ ID NO: 18).

[0090] In some embodiments, the CD147 antibody or antigen-binding fragment thereof comprises a combination of a variable heavy chain complementarity determining region 1 (VH CDR1, also referred to herein as CDRH1) sequence, a variable heavy chain complementarity determining region 2 (VH CDR2, also referred to herein as CDRH2) sequence, a variable heavy chain complementarity determining region 3 (VH CDR3, also referred to herein as CDRH3) sequence, a variable light chain complementarity determining region 1 (VL CDR1, also referred to herein as CDRL1) sequence, a variable light chain complementarity determining region 2 (VL CDR2, also referred to herein as CDRL2) sequence, and a variable light chain complementarity determining region 3 (VL CDR3, also referred to herein as CDRL3) sequence, wherein at least one complementarity determining region (CDR) sequence is selected from the group consisting of a VH CDR1 sequence comprising the amino acid sequence GFTFSNYWMN (SEQ ID NO: 10) or GFTFSNYWMD (SEQ ID NO: 11); a VH CDR2 sequence comprising the amino acid sequence EIRLKSYNYATH (SEQ ID NO: 12); a VH CDR3 sequence comprising the amino acid sequence AGTDY (SEQ ID NO: 13); a VL CDR1 sequence comprising the amino acid sequence KASQSVRTDVA (SEQ ID NO: 14) or RASQSVRTDVG (SEQ ID NO: 15); a VL CDR2 sequence comprising the amino acid sequence YSSNRYT (SEQ ID NO: 16); and a VL CDR3 sequence comprising the amino acid sequence QQDYSSPFT (SEQ ID NO: 17) or QQDYSSPYT (SEQ ID NO: 18).

[0091] In some embodiments, the CD147 antibody or antigen-binding fragment thereof comprises a combination of a VH CDR1 sequence, a VH CDR2 sequence, a VH CDR3 sequence, a VL CDR1 sequence, a VL CDR2 sequence, and a VL CDR3 sequence, wherein at least one CDR sequence is selected from the group consisting of a VH CDR1 sequence that includes a sequence that is at least 90%, 91%, 92%, 93%, 94%, 95%, 96%, 97%, 98%, 99% or more identical to a VH CDR1 sequence comprising the amino acid sequence GFTFSNYWMN (SEQ ID NO: 10) or GFTFSNYWMD (SEQ ID NO: 11); a VH CDR2 sequence that includes a sequence that is at least 90%, 91%, 92%, 93%, 94%, 95%, 96%, 97%, 98%, 99% or more identical to a VH CDR2 sequence comprising the amino acid sequence EIRLKSYNYATH (SEQ ID NO: 12); a VH CDR3 sequence that includes a sequence that is at least 90%, 91%, 92%, 93%, 94%, 95%, 96%, 97%, 98%, 99% or more identical to a VH CDR3 sequence comprising the amino acid sequence AGTDY (SEQ ID NO: 13); a VL CDR1 sequence that includes a sequence that is at least 90%, 91%, 92%, 93%, 94%, 95%, 96%, 97%, 98%, 99% or more identical to a VL CDR1 sequence comprising the amino acid sequence KASQSVRTDVA (SEQ ID NO: 14) or RASQSVRTDVG (SEQ ID NO: 15); a VL CDR2 sequence that includes a sequence that is at least 90%, 91%, 92%, 93%, 94%, 95%, 96%, 97%, 98%, 99% or more identical to a VL CDR2 sequence comprising the amino acid sequence YSSNRYT (SEQ ID NO: 16); and a VL CDR3 sequence that includes a sequence that is at least 90%, 91%, 92%, 93%, 94%, 95%, 96%, 97%, 98%, 99% or more identical to a VL CDR3 sequence comprising the amino acid sequence QQDYSSPFT (SEQ ID NO: 17) or QQDYSSPYT (SEQ ID NO: 18).

[0092] In some embodiments, the CD147 antibody or antigen-binding fragment thereof comprises a combination of a VH CDR1 sequence, a VH CDR2 sequence, a VH CDR3 sequence, a VL CDR1 sequence, a VL CDR2 sequence, and a VL CDR3 sequence, wherein the VH CDR1 sequence comprises the amino acid sequence GFTFSNYWMN (SEQ ID NO: 10) or GFTFSNYWMD (SEQ ID NO: 11); the VH CDR2 sequence comprises the amino acid sequence EIRLKSYNYATH (SEQ ID NO: 12); the VH CDR3 sequence comprises the amino acid sequence AGTDY (SEQ ID NO: 13); the VL CDR1 sequence comprises the amino acid sequence KASQSVRTDVA (SEQ ID NO: 14) or RASQSVRTDVG (SEQ ID NO: 15); the VL CDR2 sequence comprises the amino acid sequence YSSNRYT (SEQ ID NO: 16); and the VL CDR3 sequence comprises the amino acid sequence QQDYSSPFT (SEQ ID NO: 17) or QQDYSSPYT (SEQ ID NO: 18).

[0093] In some embodiments, the CD147 antibody or antigen-binding fragment thereof comprises an amino acid sequence comprising amino acid sequences selected from the group consisting of: (a) the VH CDR1 sequence GFTFSNYWMN (SEQ ID NO: 10) or GFTFSNYWMD (SEQ ID NO: 11); the VH CDR2 sequence EIRLKSYNYATH (SEQ ID NO: 12); the VH CDR3 sequence AGTDY (SEQ ID NO: 13); the VL CDR1 sequence KASQSVRTDVA (SEQ ID NO: 14) or RASQSVRTDVG (SEQ ID NO: 15); the VL CDR2 sequence YSSNRYT (SEQ ID NO: 16); and the VL CDR3 sequence QQDYSSPFT (SEQ ID NO: 17) or QQDYSSPYT (SEQ ID NO: 18); (b) the VH CDR1 sequence GFTFSNYWMD (SEQ ID NO: 11); the VH CDR2 sequence EIRLKSYNYATH (SEQ ID NO: 12); the VH CDR3 sequence AGTDY (SEQ ID NO: 13); the VL CDR1 sequence RASQSVRTDVG (SEQ ID NO: 15); the VL CDR2 sequence YSSNRYT (SEQ ID NO: 16); and the VL CDR3 sequence QQDYSSPYT (SEQ ID NO: 18); and (c) the VH CDR1 sequence GFTFSNYWMN (SEQ ID NO: 10); the VH CDR2 sequence EIRLKSYNYATH (SEQ ID NO: 12); the VH CDR3 sequence AGTDY (SEQ ID NO: 13); the VL CDR1 sequence KASQSVRTDVA (SEQ ID NO: 14); the VL CDR2 sequence YSSNRYT (SEQ ID NO: 16); and the VL CDR3 sequence QQDYSSPFT (SEQ ID NO: 17).

[0094] In some embodiments, the CD147 antibody or antigen-binding fragment thereof comprises a combination of a VH CDR1 sequence, a VH CDR2 sequence, a VH CDR3 sequence, a VL CDR1 sequence, a VL CDR2 sequence, and a VL CDR3 sequence, wherein the VH CDR1 sequence comprises a sequence that is at least 90^{%}, 91%, 92%, 93%, 94%, 95%, 96%, 97%, 98%, 99% or more identical to the amino acid sequence GFTFSNYWMN (SEQ ID NO: 10) or GFTFSNYWMD (SEQ ID NO: 11); the VH CDR2 sequence comprises a sequence that is at least 90%, 91%, 92%, 93%, 94%, 95%, 96%, 97%, 98%, 99% or more identical to the amino acid sequence EIRLKSYNYATH (SEQ ID NO: 12); the VH CDR3 sequence comprises a sequence that is at least 90%, 91%, 92%, 93%, 94%, 95%, 96%, 97%, 98%, 99% or more identical to the amino acid sequence AGTDY (SEQ ID NO: 13); the VL CDR1 sequence comprises a sequence that is at least 90%, 91%, 92%, 93%, 94%, 95%, 96%, 97%, 98%, 99% or more identical to the amino acid sequence KASQSVRTDVA (SEQ ID NO: 14) or RASQSVRTDVG (SEQ ID NO: 15); the VL CDR2 sequence comprises a sequence that is at least 90%, 91%, 92%, 93%, 94%, 95%, 96%, 97%, 98%, 99% or more identical to the amino acid sequence YSSNRYT (SEQ ID NO: 16); and the VL CDR3 sequence a sequence that is at least 90%, 91%, 92%, 93%, 94%, 95%, 96%, 97%, 98%, 99% or more identical to comprises the amino acid sequence QQDYSSPFT (SEQ ID NO: 17) or QQDYSSPYT (SEQ ID NO: 18).

[0095] Suitable CD147 antibodies of the disclosure also include an antibody or antigen binding fragment thereof that binds to the same epitope on human CD147 and/or cynomolgus monkey CD147 as a CD147 antibody comprising a heavy chain variable region amino acid sequence selected from the group consisting of SEQ ID NOs: 1-4, and a light chain variable region amino acid sequence selected from the group consisting of SEQ ID NOs: 5-9.

[0096] Suitable CD147 antibodies of the disclosure also include an antibody or antigen binding fragment thereof that binds to the same epitope on human CD147 and/or cynomolgus monkey CD147 as a CD147 antibody comprising a VH CDR1 sequence comprising the amino acid sequence GFTFSNYWMN (SEQ ID NO: 10) or GFTFSNYWMD (SEQ ID NO: 11); a VH CDR2 sequence comprising the amino acid sequence EIRLKSYNYATH (SEQ ID NO: 12); a VH CDR3 sequence comprising the amino acid sequence AGTDY (SEQ ID NO: 13); a VL CDR1 sequence comprising the amino acid sequence KASQSVRTDVA (SEQ ID NO: 14) or RASQSVRTDVG (SEQ ID NO: 15); a VL CDR2 sequence comprising the amino acid sequence YSSNRYT (SEQ ID NO: 16); and a VL CDR3 sequence comprising the amino acid sequence QQDYSSPFT (SEQ ID NO: 17) or QQDYSSPYT (SEQ ID NO: 18).

[0097] Suitable CD147 antibodies of the disclosure also include an antibody or antigen binding fragment thereof that cross-competes for binding to (inhibits the binding of) human CD147 and/or cynomolgus monkey CD147 to a CD147 antibody comprising a heavy chain variable region amino acid sequence selected from the group consisting of SEQ ID NOs: 1-4, and a light chain variable region amino acid sequence selected from the group consisting of SEQ ID NOs: 5-9.

[0098] Suitable CD147 antibodies of the disclosure also include an antibody or antigen binding fragment thereof that cross-competes for binding to (inhibits the binding of) human CD147 and/or cynomolgus monkey CD147 to a CD147 antibody comprising a VH CDR1 sequence comprising the amino acid sequence GFTFSNYWMN (SEQ ID NO: 10) or GFTFSNYWMD (SEQ ID NO: 11); a VH CDR2 sequence comprising the amino acid sequence EIRLKSYNYATH (SEQ ID NO: 12); a VH CDR3 sequence comprising the amino acid sequence AGTDY (SEQ ID NO: 13); a VL CDR1 sequence comprising the amino acid sequence KASQSVRTDVA (SEQ ID NO: 14) or RASQSVRTDVG (SEQ ID NO: 15); a VL CDR2 sequence comprising the amino acid sequence YSSNRYT (SEQ ID NO: 16); and a VL CDR3 sequence comprising the amino acid sequence QQDYSSPFT (SEQ ID NO: 17) or QQDYSSPYT (SEQ ID NO: 18).

[0099] In some embodiments, the CD147 antibody of the disclosure comprises an isolated antibody or an antigen binding fragment thereof (AB) that specifically binds to mammalian CD147, wherein the AB specifically binds human CD147 and cynomolgus monkey CD147. In some embodiments, the antibody or antigen binding fragment thereof comprises the VH CDR1 sequence GFTFSNYWMN (SEQ ID NO: 10) or GFTFSNYWMD (SEQ ID NO: 11); the VH CDR2 sequence EIRLKSYNYATH (SEQ ID NO: 12); the VH CDR3 sequence AGTDY (SEQ ID NO: 13); the VL CDR1 sequence KASQSVRTDVA (SEQ ID NO: 14) or RASQSVRTDVG (SEQ ID NO: 15); the VL CDR2 sequence YSSNRYT (SEQ ID NO: 16); and the VL CDR3 sequence QQDYSSPFT (SEQ ID NO: 17) or QQDYSSPYT (SEQ ID NO: 18). In some embodiments, the antibody or antigen binding fragment thereof comprises a heavy chain variable region comprising an amino acid sequence selected from the group consisting of SEQ ID NOs: 1-4, and a light chain variable region comprising an amino acid sequence selected from the group consisting of SEQ ID NOs: 5-9.

[0100] In some embodiments, the isolated antibody or antigen binding fragment thereof binds to the same epitope on human CD147 and/or cynomolgus monkey CD147 as an isolated antibody that comprises the VH CDR1 sequence GFTFSNYWMN (SEQ ID NO: 10) or GFTFSNYWMD (SEQ ID NO: 11); the VH CDR2 sequence EIRLKSYNYATH (SEQ ID NO: 12); the VH CDR3 sequence AGTDY (SEQ ID NO: 13); the VL CDR1 sequence KASQSVRTDVA (SEQ ID NO: 14) or RASQSVRTDVG (SEQ ID NO: 15); the VL CDR2 sequence YSSNRYT (SEQ ID NO: 16); and the VL CDR3 sequence QQDYSSPFT (SEQ ID NO: 17) or QQDYSSPYT (SEQ ID NO: 18). In some embodiments, the isolated antibody or antigen binding fragment thereof binds to the same epitope on human CD147 and/or cynomolgus monkey CD147 as an isolated antibody that comprises a heavy chain variable region comprising an amino acid sequence selected from the group consisting of SEQ ID NOs: 1-4, and a light chain variable region comprising an amino acid sequence selected from the group consisting of SEQ ID NOs: 5-9.

[0101] In some embodiments, the isolated antibody or antigen binding fragment thereof cross-competes with (inhibits the binding of) an isolated antibody that comprises the VH CDR1 sequence GFTFSNYWMN (SEQ ID NO: 10) or GFTFSNYWMD (SEQ ID NO: 11); the VH CDR2 sequence EIRLKSYNYATH (SEQ ID NO: 12); the VH CDR3 sequence AGTDY (SEQ ID NO: 13); the VL CDR1 sequence KASQSVRTDVA (SEQ ID NO: 14) or RASQSVRTDVG (SEQ ID NO: 15); the VL CDR2 sequence YSSNRYT (SEQ ID NO: 16); and the VL CDR3 sequence QQDYSSPFT (SEQ ID NO: 17) or QQDYSSPYT (SEQ ID NO: 18). In some embodiments, the isolated antibody or antigen binding fragment thereof cross-competes with (inhibits the binding of) an isolated antibody that comprises a heavy chain variable region comprising an amino acid sequence selected from the group consisting of SEQ ID NOs: 1-4, and a light chain variable region comprising an amino acid sequence selected from the group consisting of SEQ ID NOs: 5-9.

[0102] In some embodiments, the isolated antibody or antigen binding fragment thereof cross-competes with (inhibits the binding of) an isolated antibody that comprises the VH CDR1 sequence GFTFSNYWMN (SEQ ID NO: 10) or GFTFSNYWMD (SEQ ID NO: 11); the VH CDR2 sequence EIRLKSYNYATH (SEQ ID NO: 12); the VH CDR3 sequence AGTDY (SEQ ID NO: 13); the VL CDR1 sequence KASQSVRTDVA (SEQ ID NO: 14) or RASQSVRTDVG (SEQ ID NO: 15); the VL CDR2 sequence YSSNRYT (SEQ ID NO: 16); and the VL CDR3 sequence QQDYSSPFT (SEQ ID NO: 17) or QQDYSSPYT (SEQ ID NO: 18). In some embodiments, the isolated antibody or antigen binding fragment thereof cross-competes with (inhibits the binding of) an isolated antibody that comprises a heavy chain variable region comprising an amino acid sequence selected from the group consisting of SEQ ID NOs: 1-4, and a light chain variable region comprising an amino acid sequence selected from the group consisting of SEQ ID NOs: 5-9.

[0103] In some embodiments, the CD147 antibody/activatable CD147 antibody includes a heavy chain that comprises or is derived from a heavy chain amino acid sequence shown in Table 1. In some embodiments, the CD147 antibody/activatable CD147 antibody includes a light chain that comprises or is derived from a heavy chain amino acid sequence shown in Table 1. In some embodiments, the CD147 antibody/activatable CD147 antibody includes a heavy chain that comprises or is derived from a heavy chain amino acid sequence shown in Table 1, and a light chain that comprises or is derived from a light chain amino acid sequence shown in Table 1. In some embodiments, the CD147 antibody/activatable CD147 antibody includes a combination of heavy chain variable region and light chain variable region sequences from the combinations shown in Group A in Table 1. In some embodiments, the CD147 antibody/activatable CD147 antibody includes a combination of heavy chain variable region and light chain variable region sequences from the sequences shown in Group B in Table 1. In some embodiments, the CD147 antibody/activatable CD147 antibody includes a combination of heavy chain variable region and light chain variable region sequences from the sequences shown in Group C in Table 1. In some embodiments, the CD147 antibody/activatable CD147 antibody includes a combination of heavy chain variable region and light chain variable region sequences from the sequences shown in Group D in Table 1. In some embodiments, the CD147 antibody/activatable CD147 antibody includes the combination of heavy chain variable region and light chain variable region sequences shown in Group E in Table 1. In some embodiments, the CD147 antibody/activatable CD147 antibody includes the combination of heavy chain variable region and light chain variable region sequences shown in Group F in Table 1. In some embodiments, the CD147 antibody/activatable CD147 antibody includes a combination of heavy chain variable region and light chain variable region sequences from the sequences shown in Group G in Table 1. In some embodiments, the CD147 antibody/activatable CD147 antibody includes a combination of heavy chain variable region and light chain variable region sequences from the sequences shown in Group H in Table 1. In some embodiments, the CD147 antibody/activatable CD147 antibody includes the combination of heavy chain variable region and light chain variable region sequences shown in Group I in Table 1. In some embodiments, the CD147 antibody/activatable CD147 antibody includes the heavy chain variable region sequence shown in Group J in Table 1. In some embodiments, the CD147 antibody/activatable CD147 antibody includes the heavy chain variable region sequence shown in Group J in Table 1, or the combination of heavy chain variable region and light chain variable region sequences shown in Group K in Table 1. In some embodiments, the CD147 antibody/activatable CD147 antibody includes a combination of heavy chain variable region and light chain variable region sequences from the sequences shown in Group L in Table 1.

[0104] In some embodiments, the CD147 antibody/activatable CD147 antibody includes a combination of the complementarity determining region (CDR) sequences of a heavy chain sequence from the heavy chain sequences shown in Group A Table 1. In some embodiments, the CD147 antibody/activatable CD147 antibody includes a combination of the CDRs of a light chain sequence from the light chain sequences shown in Group A Table 1. In some embodiments, the CD147 antibody/activatable CD147 antibody includes a combination of the CDRs of a heavy chain sequence from the heavy chain sequences shown in Group A Table 1 and the CDRs of a light chain sequence from the heavy chain sequences shown in Group A Table 1.

[0105] In some embodiments, the CD147 antibody/activatable CD147 antibody includes a combination of CDRs of a heavy chain sequence from the heavy chain sequences shown in Group B Table 1. In some embodiments, the CD147 antibody/activatable CD147 antibody includes a combination of the CDRs of a light chain sequence from the light chain sequences shown in Group B Table 1. In some embodiments, the CD147 antibody/activatable CD147 antibody includes a combination of the CDRs of a heavy chain sequence from the heavy chain sequences shown in Group B Table 1 and the CDRs of a light chain sequence from the heavy chain sequences shown in Group B Table 1.

[0106] In some embodiments, the CD147 antibody/activatable CD147 antibody includes a combination of the CDRs of a heavy chain sequence from the heavy chain sequences shown in Group C Table 1. In some embodiments, the CD147 antibody/activatable CD147 antibody includes a combination of the CDRs of a light chain sequence from the light chain sequences shown in Group C Table 1. In some embodiments, the CD147 antibody/activatable CD147 antibody includes a combination of the CDRs of a heavy chain sequence from the heavy chain sequences shown in Group C Table 1 and the CDRs of a light chain sequence from the heavy chain sequences shown in Group C Table 1.

[0107] In some embodiments, the CD147 antibody/activatable CD147 antibody includes a combination of the CDRs of a heavy chain sequence from the heavy chain sequences shown in Group D Table 1. In some embodiments, the CD147 antibody/activatable CD147 antibody includes a combination of the CDRs of a light chain sequence from the light chain sequences shown in Group D Table 1. In some embodiments, the CD147 antibody/activatable CD147 antibody includes a combination of the CDRs of a heavy chain sequence from the heavy chain sequences shown in Group D Table 1 and the CDRs of a light chain sequence from the heavy chain sequences shown in Group D Table 1.

[0108] In some embodiments, the CD147 antibody/activatable CD147 antibody includes a combination of the CDRs of a heavy chain sequence from the heavy chain sequences shown in Group E Table 1. In some embodiments, the CD147 antibody/activatable CD147 antibody includes a combination of the CDRs of a light chain sequence from the light chain sequences shown in Group E Table 1. In some embodiments, the CD147 antibody/activatable CD147 antibody includes a combination of the CDRs of a heavy chain sequence from the heavy chain sequences shown in Group E Table 1 and the CDRs of a light chain sequence from the heavy chain sequences shown in Group E Table 1.

[0109] In some embodiments, the CD147 antibody/activatable CD147 antibody includes a combination of the CDRs of a heavy chain sequence from the heavy chain sequences shown in Group F Table 1. In some embodiments, the CD147 antibody/activatable CD147 antibody includes a combination of the CDRs of a light chain sequence from the light chain sequences shown in Group F Table 1. In some embodiments, the CD147 antibody/activatable CD147 antibody includes a combination of the CDRs of a heavy chain sequence from the heavy chain sequences shown in Group F Table 1 and the CDRs of a light chain sequence from the heavy chain sequences shown in Group F Table 1.

[0110] In some embodiments, the CD147 antibody/activatable CD147 antibody includes a combination of the CDRs of a heavy chain sequence from the heavy chain sequences shown in Group G Table 1. In some embodiments, the CD147 antibody/activatable CD147 antibody includes a combination of the CDRs of a light chain sequence from the light chain sequences shown in Group G Table 1. In some embodiments, the CD147 antibody/activatable CD147 antibody includes a combination of the CDRs of a heavy chain sequence from the heavy chain sequences shown in Group G Table 1 and the CDRs of a light chain sequence from the heavy chain sequences shown in Group G Table 1.

[0111] In some embodiments, the CD147 antibody/activatable CD147 antibody includes a combination of the CDRs of a heavy chain sequence from the heavy chain sequences shown in Group H Table 1. In some embodiments, the CD147 antibody/activatable CD147 antibody includes a combination of the CDRs of a light chain sequence from the light chain sequences shown in Group H Table 1. In some embodiments, the CD147 antibody/activatable CD147 antibody includes a combination of the CDRs of a heavy chain sequence from the heavy chain sequences shown in Group H Table 1 and the CDRs of a light chain sequence from the heavy chain sequences shown in Group H Table 1.

[0112] In some embodiments, the CD147 antibody/activatable CD147 antibody includes a combination of the CDRs of a heavy chain sequence from the heavy chain sequences shown in Group I Table 1. In some embodiments, the CD147 antibody/activatable CD147 antibody includes a combination of the CDRs of a light chain sequence from the light chain sequences shown in Group I Table 1. In some embodiments, the CD147 antibody/activatable CD147 antibody includes a combination of the CDRs of a heavy chain sequence from the heavy chain sequences shown in Group I Table 1 and the CDRs of a light chain sequence from the heavy chain sequences shown in Group I Table 1.

[0113] In some embodiments, the CD147 antibody/activatable CD147 antibody includes a combination of the CDRs of a heavy chain sequence from the heavy chain sequences shown in Group J Table 1. In some embodiments, the CD147 antibody/activatable CD147 antibody includes a combination of the CDRs of a light chain sequence from the light chain sequences shown in Group J Table 1. In some embodiments, the CD147 antibody/activatable CD147 antibody includes a combination of the CDRs of a heavy chain sequence from the heavy chain sequences shown in Group J Table 1 and the CDRs of a light chain sequence from the heavy chain sequences shown in Group J Table 1.

[0114] In some embodiments, the CD147 antibody/activatable CD147 antibody includes a combination of the CDRs of a heavy chain sequence from the heavy chain sequences shown in Group K Table 1. In some embodiments, the CD147 antibody/activatable CD147 antibody includes a combination of the CDRs of a light chain sequence from the light chain sequences shown in Group K Table 1. In some embodiments, the CD147 antibody/activatable CD147 antibody includes a combination of the CDRs of a heavy chain sequence from the heavy chain sequences shown in Group K Table 1 and the CDRs of a light chain sequence from the heavy chain sequences shown in Group K Table 1.

[0115] In some embodiments, the CD147 antibody/activatable CD147 antibody includes a combination of the CDRs of a heavy chain sequence from the heavy chain sequences shown in Group L Table 1. In some embodiments, the CD147 antibody/activatable CD147 antibody includes a combination of the CDRs of a light chain sequence from the light chain sequences shown in Group L Table 1. In some embodiments, the CD147 antibody/activatable CD147 antibody includes a combination of the CDRs of a heavy chain sequence from the heavy chain sequences shown in Group L Table 1 and the CDRs of a light chain sequence from the heavy chain sequences shown in Group L Table 1.

TABLE 1
Variable Heavy Chain Region (VH) and Variable Light Chain Region (VL)
Sequences for Antibodies and Activatable Antibodies that Bind CD147
Group A

| | |
|---|---|
| VH | EVQLQQSGPELVKPGASVKISCKASGYTFTDYYMNWVKQSHGKSLEWIGGINPNNGGTSYNQKFKGKATLTV |
| | DKSSSTAYMELRSLTSEDSAVYYCARNDGYRGYAMDYWGQGTSVTVSS (SEQ ID NO: 425) |
| VH | QVQLQQSGAELAKPGASVKLSCKASGYTFTSYTFLMHWVKQRPGQGLEWIGYINPGSGYTKYNQTFKDKATLTA |
| | DKSSSTAYMQLSSLTYEDSAVYYCARVEGYRTARYFDVWGTGTTVTVSS (SEQ ID NO: 426) |
| VH | EMKLEESGGGLVQPGGSMKLSCVASGFTFSNYWMNWVRQSPEKGLELAFVAQIRLKSYNYATHYAESVKGRFTI |
| | SRDDSKSSVYLQMNNLRAEDTGIYYCTPDGSDYWGQGTTLTVSS (SEQ ID NO: 427) |
| VH | EMKLEESGGGLVQPGGSMKLSCVASGFTFSNYRMNWVRQSPEKGLEWVAQIRLKSYNYATHYAESVKGRFTT |
| | SRDDSKSSVYLQMNNLRAEDTGIYYCTPDGSDYWGQGTTLTVSS (SEQ ID NO: 428) |
| VL | DIVMSQSPSSLAVSVGEKVTMSCKSSQSLLYSSNQKNYLAWYQQKPGQSPKLLIYWASTRESGVPDRFTGSG |
| | SGTDFTLTISSVKAEDLAVYYCQQYYSYPTFGAGTKLELK (SEQ ID NO: 429) |
| VL | DIVMSQSPSSLAVSVGEKVTMSCKSSQSLLYNNNQKNYLAWYQQKPGQSPKLLIYWASTRESGVPDRFTGSG |
| | SGTDFTLTISSVKAEDLAVYYCQQYYSYPFTFGSGTKLEIK (SEQ ID NO: 430) |
| VL | SIVMTQTPKFLLVSAGDRVTITCKASQSVSNDVAWYQQKPGQSPKLLIYYASNRYTGVPDRFTGSGYGTDFT |
| | FTISTVQAEDLAVYFCQQDYSSPYTFGGGTKLEIK (SEQ ID NO: 431) |
| VL | DILMTQSPSSMSVSLGDTVSITCHASQGISSSIGWLQQKPGKSFKGLIYHGTNLEDGVPSRFTGSGSGADYS |
| | LTISSLESEDFADYYCVQYAQFPYTFGGGTKLEIK (SEQ ID NO: 432) |

Group B

| | |
|---|---|
| VH | GLLKPSETLSLTCAVYGGSFSGYYWSWIRQPPGKGLEWIGEINHSGSTNYNPSLKSRVTISVDTSKMQFSLK |
| | LSSVTAADTAVYYCARGTTEYYYYYYGMDVWGQGTTVTVSSGSASAPTLFPLVSCENSPSDTSSVAVGCLAQ |
| | DFLPDXITFSWKYKNNSDISSTRGFPSVLRGGKYAATSQVLLPSKDVMQGTDEHWTGSKE (SEQ ID |
| | NO: 433) |
| VH | LVKPSETLSLTCTVSGGSISSYYWNWIRQPPGKGLEWIGYIYYSGSTNYNPSLKSRVTISVDTSKNQFSLKL |
| | SSVTAADTAVYYCARDRGVGATGFDYWGQGTLVTVSSGSASAPTLFPLVSCENSPSDTSSVAVGCLAQDFLP |
| | DSITFSWKYKNNSDISSTRGFPSVLRGGKYAATSQVLLPSKDVMQGTDEHKVC (SEQ ID NO: 434) |
| VH | KKPGASVKVSCKASGYTFTSYDINWVRQATGQGLEWMGWMNPNSGNTGYAQKFQGRVTMNRNTSISTAYMEL |
| | SSLRSEDTAVYYCARGGHGGSYFYSYYGMDVWGQGTTVTVSSGSASAPTLFPLVSCENSPSDTSSVAVGCLA |
| | QDFLPDSITFSWKYKNNSDISSTRGFPSVLRGGKYAATSQVLLPSKDVMQGTDEHWCK (SEQ ID |
| | NO: 435) |
| VH | EVKKPGASVKVSCPCASGYTFTSYDINWVRQATGQGLEWMGWMNPNSGNTGYAQKFQGRVTMTRNTSISTAYM |
| | ELSSLRSEDTAVYYCAREEWLVRYYGMDVWGQGTTVTVSSGSASAPTLFPLVSCENSPSDTSSVAVGCLAQD |
| | FLPDSITFSWKYKNNSDISSTRGFPSVLRGGKYAATSQVLLPSKDVMQGTDEHKV (SEQ ID NO: 436) |
| VH | KLPETLSLTCAVYGGSFSGYYWSWIRQPPGKGLEWIGEINHSGSTNYNPSLKSRVTISVDTSKNQFSLKLSS |
| | VTAADTAVYYCARGAAEYYYYYYGMDVWGQGTTVTVSSGSASAPTLFPLVSCENSPSDTSSVAVGCLAQDFL |
| | PDXITFXWKYKNNSDISSTRGFPSVLRGGKYAATSQVLLPSKDVMQGTDEHWTGSKE (SEQ ID |
| | NO: 437) |
| VH | SETLSLTCAVYGGSFSGYYWSWIRQPPGKGLEWIGEINHSGSTNYNPSLKSRVTISVDTSKNQFSLKLSSVT |
| | AADTAVYYCARGGTTVTFDAFDIWGQGTMVTVSSGSASAPTLFPLVSCENSPSDTSSVAVGCLAQDFLPDSI |
| | TFSWKYKNNSDISSTRGFPSVLRGGKYAATSQVLLPSKDVMQGTDE (SEQ ID NO: 438) |
| VH | NPQTTLTLTCTFSGFSLITRGVGVDWIRQPPGKALQWLALIYWNDDKRYSPSLKSRLTITKDTSKNQWLTM |
| | TNMDPVDTATYYCAHHFFDSSGYYPFDSWGQGTLVSVSSASTKGPSVFPLAPCSRSTSESTAALGCLVKDYF |
| | PEPVT (SEQ ID NO: 439) |
| VH | GEGLVKPGGSLRLSCAASGFTFSSYSMNWVRQAPGKGLEWVSSISSSSSYIYYADSVKGRFTISRDNAKNSL |
| | YLQMNSLRAEDTAVYYCARDSSGWYEDYFDYWGQGTLVTVSSASTKGPSVFPLAPCSRSTSESTAALGCLVK |
| | DYFPEPVTVSWNSGALTSGVHTFPAVLQS (SEQ ID NO: 440) |
| VH | LTCTFSGFSLITRGVGVDWIRQPPGKALQWLALIYWNDDKRYSPSLKSRLTITKDTSKNQWLTMTNMDPVD |
| | TATYYCAHHFFDSSGYYPFDSWGQGTLVSVSSASTKGPSVFPLAPCSRSTSESTAALGCLVKDYFPEPVTVS |
| | WNSGALTSGVHTFQL (SEQ ID NO: 441) |
| VH | GGGLVQPGGSLRLSCAASGFTFSSYAMSWVRQAPGKGLEWVSTISVSGITTYYVDSVKGRFTISRDNSKNIL |
| | YLQMNSLRAEDTAVYYCAKRIFGVVWGQGTLVTVSSASTKGPSVFPLAPCSRSTSESTAALGCLVKDYFPEP |
| | VTVSWNLGALTSGVHTFPAVLQS (SEQ ID NO: 442) |
| VL | LSLPVTPGEPASISCRSSQSLLHSNGYNYLDWYLQKPGQSPQLLIYLGSNRASGVPDRFSGSGSGTDFTLKI |
| | SRVEAEDVGIYYCMQTRQTPRTFGQGTKVEIKRTVAAPSVFIFPPSDEQLKSGTASWCLLNNFYPREAKEH |
| | QKSP (SEQ ID NO: 443) |
| VL | SQSPSSLSASVGERVTITCRASQGIRDELGWYQQKPGKAPKRLIYVASSLQSGVPSRFSGSGSGTEFTLTIS |
| | SLQPEDFATYYCLQHNGYPRTFGQGTKVEIKRTVAAPSVFIFPPSDEQLKSGTASWCLLNNFYPREAKEHQ |
| | KSP (SEQ ID NO: 444) |
| VL | HSLAVSLGERATINCKSSQSVLYSFNNKNYLAWYQQKPGQPPKLLIYWASTRESGVPDRFGGSGSGTDFTLT |
| | ISSLQAEDVAVYYCQQYYSTPRTFGQGTKVEIKRTVAAPSVFIFPPSDEQLKSGTASWCLLNNFYPREAKE |
| | HQKSP (SEQ ID NO: 445) |
| VL | GQSPSSLSASVGDRVTITCRASQDIRDNLGWYQQKPGKAPKRLIYAASNLQSGVPSRFSGSGSGTEFTLTIS |
| | SLQPEDFATYYCLQYKTYPWTFGQGTKVEIKRTVAAPSVFIFPPSDEQLKSGTASWCLLNNFYPREXKEHQ |
| | KSP (SEQ ID NO: 446) |
| VL | MPVTPGEPASISCRSSQSLLHSNGYNYLDWYLQKPGQSPQLLIYLGSNRASGVPDRFSGSGSGTDFTLKISR |
| | VEAEDVGIYYCMQSLQIPRLFGPGTKVDIKRTVAAPSWIFPPSDEQLKSGTASWCLLSNFYPREAKVQW |
| | (SEQ ID NO: 447) |
| VL | LAVSLGERATINCKSSQSVLYSFNNKNYLAWYQQKPGQPPKLLIYWASTRESGVPDRFSGSGSGTDFTLTIS |
| | SLQAEDVAVYYCQQYYSTPRTFGQGTKVEIKRTVAAPSVFIFPPSDEQLKSGTASWCLLNNFYPREAKVQW |
| | KVI (SEQ ID NO: 448) |
| VL | VTQSPLSLSVTPGQPASISCKSSQSLLHSDGKTYLYWYLQKPGQPPQLLIYEAFNRFSGVPDRFSGSGSGTD |
| | FTLKISRVEAEDVGLYYCMQSIELPFTFGGGTKVEIKRTVAAPSVFIFPPSDEQLKSGTASWCLLNNFYPR |
| | KERV (SEQ ID NO: 449) |
| VL | LDIQLTQSPSSLSASVGDRVTITCRASQDISIYIAWFQQRPGKAPKSLIYAASSLQSGVPSKFSGSGSGTDF |
| | TLTISSLQPEDFATYYCQQYNSYPFTFGP (SEQ ID NO: 450) |
| VL | GIRLDIQLTQSPSSLSASVGDRVTITCRASQGISIYLAWFQQRPGKAPKSLIYAASSLQSGVPSKFSGSGSG |
| | TDFTLTISSLQPEDFATYYCQQYNSYPFTFGPGTKVDIKRTVAAPSVFIFPPSDEQLKSGTASWCLLNNFY |
| | PREAKVQWKVDNALQSGKPN (SEQ ID NO: 451) |

Group C

| | |
|---|---|
| VH | GLLKPSETLSLTCAVYGGSFSGYYWSWIRQPPGKGLEWIGEINHSGSTNYNPSLKSRVTISVDTSKNQFSLK |
| | LSSVTAADTAVYYCARGTTEYYYYYYGMDVWGQGTTVTVSSGSASAPTLFPLVSCENSPSDTSSVAVGCLAQ |
| | DFLPDXITFSWKYKNNSDISSTRGFPSVLRGGKYAATSQVLLPSKDVMQGTDEHWTGSKE (SEQ ID |
| | NO: 433) |
| VH | LVKPSETLSLTCTVSGGSISSYYWNWIRQPPGKGLEWIGYIYYSGSTNYNPSLKSRVTISVDTSKNQFSLKL |
| | SSVTAADTAVYYCARDRGVGATGFDYWGQGLVTVSSGSASAPTLFPLVSCENSPSDTSSVAVGCLAQDFLPD |
| | SITFSWKYKNNSDISSTRGFPSVLRGGKYAATSQVLLPSKDVMQGTDEHKVC (SEQ ID NO: 452) |
| VH | KKPGASVKVSCKASGYTFTSYDINWVRQATGQGLEWMGWMNPNSGNTGYAQKFQGRVTMNRNTSISTAYMEL |
| | SSLRSEDTAVYYCARGGHGGSYFYSYYGMDVWGQGTTVTVSSGSASAPTLFPLVSCENSPSDTSSVAVGCLA |
| | QDFLPDSITFSWKYKNNSDISSTRGFPSVLRGGKYAATSQVLLPSKDVMQGTDEHWCK (SEQ ID |
| | NO: 435) |
| VH | EVKKPGASVKVSCKASGYTFTSYDINWVRQATGQGLEWMGWMNPNSGNTGYAQKFQGRVTMTRNTSISTAYM |
| | ELSSLRSEDTAVYYCAREEWLVRYYGMDVWGQGTTVTVSSGSASAPTLFPLVSCENSPSDTSSVAVGCLAQD |
| | FLPDSITHSWKYKNNSDISSTRGFPSVLRGGKYAATSQVLLPSKDVMQGTDEHKV (SEQ ID NO: 436) |
| VH | KLPETLSLTCAVYGGSFSGYYWSWIRQPPGKGLEWIGEINHSGSTNYNPSLKSRVTISVDTSKNQFSLKLSS |
| | VTAADTAVYYCARGAAEYYYYYYGMDVWGQGTTVTVSSGSASAPTLFPLVSCENSPSDTSSVAVGCLAQDFL |
| | PDXITFXWKYKNNSDISSTRGFPSVLRGGKYAATSQVLLPSKDVMQGTDEHVVTGSKE (SEQ ID |
| | NO: 437) |
| VH | GEGLVKPGGSLRLSCAASGFTFSSYSMNWVRQAPGKGLEWVSSISSSSSYIYYADSVKGRFTISRDNAKNSL |
| | YLQMNSLRAEDTAVYYCARDSSGWYEDYFDYWGQGTLVTVSSASTKGPSVFPLAPCSRSTSESTAALGCLVK |
| | DYFPEPVTVSWNSGALTSGVHTFPAVLQS (SEQ ID NO: 440) |
| VH | SETLSLTCAVYGGSFSGYYWSWIRQPPGKGLEWIGEINHSGSTNYNPSLKSRVTISVDTSKHQFSOIOSSVT |
| | AADTAWCARGGTTWFDAFDIWGQGTMVTVSSGSASAPTLFPLVSCENSPSDTSSVAVGCLAQDFLPDSIT |
| | FSWKYKNNSDISSTRGFPSVLRGGKYAATSQVLLPSKDVMQGTDE (SEQ ID NO: 453) |
| VH | LTCTFSGFSLITRGVGVDWIRQPPGKALQWLALIYWNDDKRYSPSLKSRLTITKDTSKNQWLTMTNMDPVD |
| | TATYYCAHHFFDSSGYYPFDSWGQGTLVSVSSASTKGPSVFPLAPCSRSTSESTAALGCLVKDYFPEPVTVS |
| | WNSGALTSGVHTFQL (SEQ ID NO: 441) |
| VH | GGGLVQPGGSLRLSCAASGFTFSSYAMSWVRQAPGKGLEWVSTISVSGITTYYVDSVKGRFTISRDNSKNIL |
| | YLQMNSLRAEDTAVYYCAKRIFGVVWGQGTLVTVSSASTKGPSVFPLAPCSRSTSESTAALGCLVKDYFPEP |
| | VTVSWNLGALTSGVHTFPAVLQS (SEQ ID NO: 442) |
| VH | GIRLDIQLTQSPSSLSASVGDRVTITCRASQGISIYLAWFQQRPGKAPKSLIYAASSLQSGVPSKFSGSGSG |
| | TDFTLTISSLQPBDFATYYCQQYNSYPFTFGPGTKVDIKRTVAAPSVFIFPPSDEQLKSGTASWCLLNNFY |
| | PREAKVQWKVDNALQSGKPN (SEQ ID NO: 451) |
| VH | ERATINCKSSQSVLYSSNNKNYLAWYQQKPGQPPKLLIYWASTRESGVPDRFSGSGSGTDFTLTISSLQAED |
| | VAVYYCQQYYSTP (SEQ ID NO: 454) |
| VH | ERATINCKSSQSVLYSFNNKNYLAWYQQKPGQPPKLLIYWASTRESGVPDRFSGSGSGTDFTLTISSLQAED |
| | VAVYYCQQYYSTRT (SEQ ID NO: 455) |
| VH | ERATINCKSSQSVLYSFNNKNYLAWYQQKPGQPPKLLIYWASTRESGVPDRFGGSGSGTDFTLTISSLQAED |
| | VAVYYCQQYYSTRT (SEQ ID NO: 456) |
| VL | LSLPVTPGEPASISCRSSQSLLHSNGYNYLDWYLQKPGQSPQLLIYLGSNRASGVPDRFSGSGSGTDFTLKI |
| | SRVEAEDVGIYYCMQTRQTPRTFGQGTKVEIKRTVAAPSVFIFPPSDEQLKSGTASWCLLNNFYPREAKEH |
| | QKSP (SEQ ID NO: 443) |
| VL | SQSPSSLSASVGERVTITCRASQGIRDELGWYQQKPGKAPKRLIYVASSLQSGVPSRFSGSGSGTEFTLTIS |
| | SLQPEDFATYYCLQHNGYPRTFGQGTKVEIKRTVAAPSVFIFPPSDEQLKSGTASWCLLNNFYPREAKEHQ |
| | KSP (SEQ ID NO: 444) |
| VL | HSLAVSLGERATINCKSSQSVLYSFNNKNYLAWYQQKPGQPPKLLIYWASTRESGVPDRFGGSGSGTDFTLT |
| | ISSLQAEDVAVYYCQQYYSTPRTFGQGTKVEIKRTVAAPSVFIFPPSDEQLKSGTASWCLLNNFYPREAKE |
| | HQKSP (SEQ ID NO: 445) |
| VL | GQSPSSLSASVGDRVTITCRASQDIRDNLGWYQQKPGKAPKRLIYAASNLQSGVPSRFSGSGSGTEFTLTIS |
| | SLQPEDFATYYCLQYKTYPWTFGQGTKVEIKRTVAAPSVFIFPPSDEQLKSGTASWCLLNNFYPREXKEHQ |
| | KSP (SEQ ID NO: 446) |
| VL | MPVTPGEPASISCRSSQSLLHSNGYNYLDWYLQKPGQSPQLLIYLGSNRASGVPDRFSGSGSGTDFTLKISR |
| | VEAEDVGIYYCMQSLQIPRLFGPGTKVDIKRTVAAPSVFIFPPSDEQLKSGTASWCLLSNFPREAKVQW |
| VL | LAVSLGERATINCKSSQSVLYSFNNKNYLAWYQQKPGQPPKLLIYWASTRESGVPDRFSGSGSGTDFTLTIS |
| | SLQAEDVAVYYCQQYYSTPRTFGQGTKVEIKRTVAAPSVFIFPPSDEQLKSGTASWCLLNNFYPREAKVQW |
| | KVI (SEQ ID NO: 448) |
| VL | NPQTTLTLTCTFSGFSLITRGVGVDWIRQPPGKALQWLALIYWNDDKRYSPSLKSRLTITKDTSKNQVVLTM |
| | TNMDPVDTATYYCAHHFFDSSGYYPFDSWGQGTLVSVSSASTKGPSVFPLAPCSRSTSESTAALGCLVKDYF |
| | PEPVT (SEQ ID NO: 439) |
| VL | VTQSPLSLSVTPGQPASISCKSSQSLLHSDGKTYLYWYLQKPGQPPQLLIYEAFNRFSGVPDRFSGSGSGTD |
| | FTLKISRVEAEDVGLYYCMQSIELPFTFGGGTKVEIKRTVAAPSVFIFPPSDEQLKSGTASWCLLNNFYPR |
| | KERV (SEQ ID NO: 449) |
| VL | LDIQLTQSPSSLSASVGDRVTITCRASQDISIYLAWFQQRPGKAPKSLIYAASSLQSGVPSKFSGSGSGTDF |
| | TLTISSLQPEDFATYYCQQYNSYPFTFGP (SEQ ID NO: 450) |
| VL | HSLAVSLGERATINCKSSQSVLYSFNNKNYLAWYQQKPGQPPKLLIYWASTRESGVPDRFGGSGSGTDFTLT |
| | ISSLQAEDVAVYYCQQYYSTPRTFGQGTKVEIKRTVAAPSVFIFPPSDEQLKSGTASVVCLLNNFYPREAKE |
| | HQKSP (SEQ ID NO: 445) |
| VL | GQSPSSLSASVGDRVTITCRASQDIRDNLGWYQQKPGKAPKRLIYAASNLQSGVPSRFSGSGSGTEFTLTIS |
| | SLQPEDFATYYCLQYKTYPWTFGQGTKVEIKRTVAAPSVFIFPPSDEQLKSGTASWCLLNNFYPREXKEHQ |
| | KSP (SEQ ID NO: 446) |
| VL | LAVSLGERATINCKSSQSVLYSFNNKNYLAWYQQKPGQPPKLLIYWASTRESGVPDRFSGSGSGTDFTLTIS |
| | SLQAEDVAVYYCQQYYSTPRTFGQGTKVEIKRTVAAPSVFIFPPSDEQLKSGTASVVCLLNNFYPREAKVQW |
| | KVI (SEQ ID NO: 448) |
| VL | DRVTITCRASQDIRDNLGWYQQKPGKAPKRLIYAASNLQSGVPSRFSGSGSGTEFTLTISSLQPEDFATYYC |
| | LQYKTYP (SEQ ID NO: 457) |
| VL | DRVTITCRASQGIRNDLGWYQQKPGKAPKRLIYAASSLQSGVPSRFSGSGSGTEFTLTISSLQPEDFATYYC |
| | LQHNSYP (SEQ ID NO: 458) |

Group D

| | |
|---|---|
| VH | EVKLEESGGGLVQPGGSMKLSCVASGFRRFSNFWMDVVVRQSPFKGLEWIAGIRLKSYNYARRHYAESVKGRFTI |
| | SRDDSKSSWLQMNNLRAEDTGIYYCTDWDGAYWGQGTLVTVSA (SEQ ID NO: 459) |
| VH | EVQLVESGGGLVQPGGSLKLSCAASGFTFSNFWMDWVRQASGKGLETWGGIRLKSYNYATHYAESVKGRFTI |
| | SRDDSKNTAYLQMNSLKTEDTAVYYCTRWDGAYWGQGTLVTVSS (SEQ ID NO: 460) |
| VH | EVQLVESGGGLVQPGGSLRLSCAASGFTFSNFWMDWVRQAPGKGLETWGGIRLKSYNYATHYAESVKGRFTI |
| | SRDDSKNTAYLQMNSLRAEDTAVYYCTRWDGAYWGQGTLVTVSS (SEQ ID NO: 461) |
| VH | EVQLVESGGGLVQPGGSLRLSCAASGFTFSNFWMDWVRQAPGKGLEWIAGIRLKSYNYATHYAESVKGRFTI |
| | SRDDSKSTVYLQMNSLRAEDTAVYYCTDWDGAYWGQGTLVTVSS (SEQ ID NO: 462) |
| VH | EVQLVESGGGLVQPGGSLKLSCAASGFTFSNFWMDVIFVRQASGKGLEWVGEIRLKSTNYATHYAESVKGRFTI |
| | SRDDSKNTAYLQMNSLKTEDTAVYYCTRTSTGYWGQGTTVTVSS (SEQ ID NO: 463) |
| VH | EVQLVESGGGLVQPGGSLKLSCAASGFTFSNFWMDWVRQASGKGLEWVAEIRLKSTNYATHYAESVKGRFTI |
| | SRDDSKSTVYLQMNSLKTEDTAVYYCTATSTGYWGQGTTVTVSS (SEQ ID NO: 464) |
| VH | EVQLVESGGGLVQPGGSLKLSCAASGFTFSNEWMDWVRQASGKGLEWVGEIRLKSTNYATHYAESVKGRFTI |
| | SRDDSKNTAYLQMNSLKTEDTAVYYCTATSTGYWGQGTTVTVSS (SEQ ID NO: 465) |
| VH | EVKLEESGGGLVQPGGSMKLSCVASGFTFSNFWMDWVRQSPFKGLEWVAFIRLKSTNYATHYAESVKGRFTI |
| | SRDDSKSSVYLQMNNLRAEDTGIYYCTATSTGYWGQGTTLTVSS (SEQ ID NO: 466) |
| VH | QVQLQQPGAEIVRPGASVKLSCKASGYTFTDYWMNWVKLRPGQGLEWIGIIDPSDSYASYNQKFKGKATLTV |
| | DESSSTAYMQLSSLTSEDSAVYYCARKSYYGGNYYYAMDYWGQGTSVTVSS (SEQ ID NO: 467) |
| VL | DIVMTQSHKFMSTSVGDRVSITCKASQDVSTDVAWYQQKPGQSPKLLIYSASYRYTGVPDRFTGSGSGTDFT |
| | FTISSVQAEDLAVYYCQQHYSTPFTFGSGTKLEIK (SEQ ID NO: 468) |
| VL | DIQMTQSPSSLSASVGDRVTITCKASQDVSTDVAWYQQKPGKAPKLLIYSASYRYTGVPSRFSGSGSGTDFT |
| | FTISSLQPEDIATYYCQQHYSTPFTFGQGTKLEIK (SEQ ID NO: 469) |
| VL | DIQMTQSPSSLSASVGDRVTITCKASQDVSTDVAWYQQKPGKAPKLLIYSASYRYTGVPSRFSGSGSGTDFT |
| | LTISSLQPEDIATYYCQQHYSTPFTFGQGTKLEIK (SEQ ID NO: 470) |
| VL | DIQMTQSPSSLSASVGDRVTITCKASQDVSTDVAWYQQKPGKSPKLLIYSASYRYTGVPSRFSGSGSGTDFT |
| | LTISSLQPEDIATYYCQQHYSTPFTFGQGTKLEIK (SEQ ID NO: 471) |
| VL | DIVMTQSPSSLSASVGDRVTITCKASQDVSTDVAWYQQKPGKSPKLLIYSASYRYTGVPSRFSGSGSGTDFT |
| | LTISSLQPEDIATYYCQQHYSTPFTFGQGTKLEIK (SEQ ID NO: 472) |
| VL | DIQMTQSPSSLSASVGDRVTITCKASQSVSNDVAWYQQKPGKAPKLLIYYASNRYTGVPSRFSGSGSGTDFT |
| | FTISSLQPEDIATYYCQQDYSSPYTFGGGTKVEIK (SEQ ID NO: 473) |
| VL | DIQMTQSPSSLSASVGDRVTITCKASQSVSNDVAWYQQKPGKSPKLLIYYASNRYTGVPSRFSGSGSGTDFT |
| | FTISSLQPEDIATYFCQQDYSSPYTFGGGTKVEIK (SEQ ID NO: 474) |
| VL | EIVMTQSPATLSVSPGERATLSCKASQSVSNDVAWYQQKPGQAPRLLIYYASNRYTGIPARFSGSGSGTEFT |
| | LTISSLQSEDFAVYYCQQDYSSPYTFGGGTKVEIK (SEQ ID NO: 475) |
| VL | EIVMTQSPATLSVSPGERATLSCKASQSVSNDVAWYQQKPGQSPRLLIYYASNRYTGVPARFSGSGSGTEFT |
| | LTISSLQSEDFAVYFCQQDYSSPYTFGGGTKVEIK (SEQ ID NO: 476) |
| VL | SIVMTQSPKILLVSAGDRVTITCKASQSVSNDVAWYQQKPGQSPKLLIYYASNRYTGVPDRFTGSGYGTDFT |
| | FTISTVQAEDLAVYFCQQDYSSPYTFGGGTKLEIK (SEQ ID NO: 477) |
| VL | EIVLTQSPALMAASPGEKVTITCSVSSSINSINLHWYRQKSETSPKPWIYGTSNLASGVPVRFSGSGSGTSY |
| | SLTISSMEAEDAATYYCQQWSSYPLTFGAGTKLELK (SEQ ID NO: 478) |

Group E

| | |
|---|---|
| VH | VQLVQSGAEVKKPGASVKVSCKASGYTFTGYYMHWVRQAPGQGLEWMGWINPNSGGTNYAQKFQGRVTMTRD |
| | TSASTAYMELSGLRSEDTAVYYCARGNLFIDYWGQGTLVTVSS (SEQ ID NO: 479) |
| VH | EVQLVESGAEVKKPGASVRVSCRASGYTFTNYAISWVRQAPGQGLEWMGWISTYNGNTLYAQKLQGRVTMTT |
| | DTSTSTAYMELRSLRSDDTAVYYCARDTDTYYFDYWGQGTLVTVSS (SEQ ID NO: 480) |
| VH | EVQLLESGAEVKKPGASVKVSCKASGYTFTSHYMHWVRQAPGQGLEWMGVINPSGGSTSYAQKFQGRVTMTR |
| | DTSTSTVYMDLSSLRSEDTAVYYCARRSEAYYHGMDVWGQGTTVTVSS (SEQ ID NO: 481) |
| VH | EVQLVESGAEVKKPGASVKVSCKASGYTFTGYYMHWVRQAPGQGLEWMGWINPNSGGTNYAQKFQGRVTMTR |
| | DTSISTAYMELSSLRSDDTAVYYCARGATGGYGMDVWGQGTTVTVSS (SEQ ID NO: 482) |
| VH | QVQLVQSGAEVKKPGASVKVSCKASGYGFTSYAIHWLRQAPGQRLEWMGWINPGNGNTKYSQKFQGRVTITR |
| | DTSATTAYMELTSLRSEDSDTAVYYCARDLDGGSFDHWGQGTLVTVSS (SEQ ID NO: 483) |
| VH | QVQLVQSGAEVKKPGASVKISCKASGYTFTTYWIHWVRQAPGQGPEWMGLIKPSSGSTTYPQKFQGRVTMTR |
| | DTSTSTVYMELSSLRSEDTAVYYCARLEGIGAASNDWGQGTLVTVSS (SEQ ID NO: 484) |
| VH | QVQLVQSGSELKKPGASVKVSCKASGYSFRSYDINWVRQAPGQGLEWMGFLNPSDGGTTYAQKFQGRVTVTS |
| | DTSTSTVYMELSSLRSENTAVYYCARVGITSTETRAEYFQHWGQGTLVTVSS (SEQ ID NO: 485) |
| VH | QVQLVQSGAEVKKPGASWLSCKASGYTFTRYWVHWVRQAPGQGPEWMGLIKPRDGATTYAQKFQGRVTLTR |
| | DTSTTTVYMELTSLRSEDTGIYYCGLLEGDDAFDVWGQGTMVTVSS (SEQ ID NO: 486) |
| VH | QVQLVESGAEVKKPGASVKVSCKASGYTFTSYYMHWVRQAPGQGLEWMGIINPSGGSTSYAQKFQGRVTMTR |
| | DTSTSTVYMELSSLRSEDTAVYYCARESYGSGSLDYWGQGTLVTVSS (SEQ ID NO: 487) |
| VH | EVQLLESGAEVKKPGASVKVSCKASGYTFTGYYMHWVRQAPGQGLEWMGWINPNSGGTNYAQKFQGRVTMTR |
| | DTSISTAYMELSRLRSDDTAVYYCARPKGHSGGWYAFDIWGQGTMVTVSS (SEQ ID NO: 488) |
| VH | QVQLQQSGPGLVKPAQTLSLTCAISGDSVSSSRAAWNWIRQSPSRGLEWLGRTFYRSRWNNEYAETVKSRIT |
| | INPDTSTNHFSLQLTSVSPEDTAIYYCARGGGNFDSWGQGTLVTVSS (SEQ ID NO: 489) |
| VH | QVQLVQSGAEVKKPGASVKVSCKASGYTFTSYYMHWVRQAPGQGLEWMGIINPSGGSTSYAQKFQGRVTMTR |
| | DTSISTVYMELSSLRSEDTAVYYCARESEDSIAFDIWGQGTMVTVSS (SEQ ID NO: 490) |
| VH | QVQLVQSGAEVRKPGASVMVSCKASGYPFTSYAIHWLRQAPGQSLEWMGWIKPANGDITYSQKFQGRVTITG |
| | DISATTAYMELSSLRSEDTAMYYCTKGGGGYFDYWGQGTLVTVSS (SEQ ID NO: 491) |
| VH | QVQLVQSGAEVKKPGESLRISCQGSGYSFINHWISWVRQMPGKGLEWLGRIDPSDSYTNYSPSVQGHVTISV |
| | DKSISTAYLQWSSLKASDTAIYYCARHDRNVYFDPWGQGTLVTVSS (SEQ ID NO: 492) |
| VH | QVQLVQSGAEVRKPGASVMVSCKASGYPFTSYAIHWLRQAPGQSLEWMGWIKPANGDITYSQKFQGRVTITG |
| | DISATTAYMELSSLRSEDTAMYYCAKGGGGYFDYWGQGTLVTVSS (SEQ ID NO: 493) |
| VH | EVQLVQSGAEVKKPGASVKVSCKASGYTFTGYYMHWVRQAPGQGLEWMGWINPNSGGTNYAQKFQGWVTMTR |
| | DTSISTAYMELSRLRSDDTAVYYCARDQDFDYWGQGTLVTVSS (SEQ ID NO: 494) |
| VH | QVQLVESGGGWQPGRSLRLSCAASGFTFSTYAMHWVRQAPGRGLEWVAGISYDGSNKYHADPVKGRFTISR |
| | DNSKNTLYLQMNNLRVEDSAVYYCAGDRSGGLDVWGQGTTVTVSS (SEQ ID NO: 495) |
| VH | EVQLVESGAEVKKPGASVKVSCKASGYTFTGYYMHWVRQAPGQGLEWMGWINPNSGGTNYAQKFQGRVTMTR |
| | DTSISTAYMELRSLRSDDTAVYYCARGGGAFDIWGQGTMVTVSS (SEQ ID NO: 496) |
| VH | QVQLVQSGAEVKKPGASVKVSCKASGYTFTGYYMHWVRQAPGQGLEWMGWINPNSGGTNYAQKFQGWVTMTR |
| | DTSISTAYMELSRLRSDDTAVYYCARDQDFDYWGQGTLVTVSS (SEQ ID NO: 497) |
| VH | QMQLVQSGAEVKKPGASVKVSCKASGYTFTGYYIHWVRQAPGQGLEWMGWINPNSGGTIYAQKFQGRVTMTR |
| | DTSISTAYMELSRLRSDDTAVYYCARGSTNFDSWGQGTLVTVSS (SEQ ID NO: 498) |
| VH | QVQLVESGAEVKKPGASVKVSCKASGYTFTSHYMHWVRQAPGQGLEWMGVINPSGGSTSYAQKFQGRVTMTR |
| | DTSTSTVYMDLSSLRSEDTAVYYCARRSEAYYHGMDVWGQGTTVTVSS (SEQ ID NO: 499) |
| VH | EVQLLESGAEVKKPGSSVKVSCKASGYPFTSYAIHWLRQAPGQSLEWMGWIKPANGDITYSQKFQGRVTITG |
| | DISATTAYMELSSLRSEDTAMYYCAKGGGGYFDYWGQGTLVTVSS (SEQ ID NO: 500) |
| VH | QVQLVQSGGGVVQPGRSLRLSCAASGFTFSSYAMHWVRQAPGKGLEWVAVISYDGTNKYYADSVKGRFTISR |
| | DSSKNALYLQMNSLRTEDTALYYCARGGGWWHAMDWGQGTTVTVSS (SEQ ID NO: 501) |
| VL | LPVLTQPASVSGSPGQSITISCTGTSSDVGSYNLVSWYQQHPGKAPKLMIYDVSKRPSGVSNRFSGSKSGNT |
| | ASLTISGLQAEDEADYYCSSYTSSSTFVFGGGTKLTVL (SEQ ID NO: 502) |
| VL | QPVLTQPASVSGSPGQSITISCTGTSSDVGGYNYVSWYQQHPDKPPKLIIYYVSNRPSGVSNRFSGSKSGNT |
| | ASLTISGLQAEDEADYYCASYRSNTNYVFGTGTKVTVL (SEQ ID NO: 503) |
| VL | QSVLTQPPSASGTPGQRVTISCSGSSSNIGSNYVYWYQQFPGTTPKLLIYRNNQRPSGVPDRFSGSKSATSA |
| | SLAISGLRSEDEADYYCAAWDDSLSGWVFGGGTKLTVL (SEQ ID NO: 504) |
| VL | QAGLTQPASVSGSPGQSITISCTGTSSDVGGYNYVSWYQQHPGKAPKLMIYNVTKRPSGVSNRFSGSKSGNT |
| | ASLTISGLQAEDEADYYCSSYTSGTTLSVFGTGTKLTVL (SEQ ID NO: 505) |
| VL | QSALTQPRSVSGSPGQSVTISCTGTSNDVGAYNYVSWYQQHPAKAPKLMIYGVTKRPSGVPDRFSGANSGNT |
| | ATLTITRVEAGDEADYFCQWERSSGQYVFGTGTKLTVL (SEQ ID NO: 506) |
| VL | QSWTQPASVSGSPGQSITISCTGTSSDVGSYNLVSWYQQHPGKAPKLMIYDVTNRPSGVSNRFSGSKSGNT |
| | ASLTISGLQAEDEADYYCSSYTRSSTYVFGTGTKVTVL (SEQ ID NO: 507) |
| VL | QAVVTQEPSLTVSPGGTVTLTCGSSTGAVTSGHYPYWFQQKPGQAPRTLIYDTSNKHSWTPARFSGSLLGGK |
| | AALTLSGAQPEDEAEYYCLLSYSGARVFGTGTKVTVL (SEQ ID NO: 508) |
| VL | QTVVTQEPSLTVSPGGTVTLTCGSSTGDVTSGHYPYWFQQKPGQAPRTLIYDTSNKHSWTPARFSASLLGGK |
| | AALTLSGAQPEDEADYYCLLAYSEVRVFGGGTQLTVL (SEQ ID NO: 509) |
| VL | QSVLTQPPSASGSPGQSVTISCTGSASDIGHSFYVSWYRQYPGKAPDLLIFQVNQRPSGVPNRFSASKSGNT |
| | ASLTVSGLQIEDEADYYCSSYAGGTSIVFGSGTKLTVL (SEQ ID NO: 510) |
| VL | QTVVTQEPSLTVSPGGTVTLTCGSSTGAVTSGHYPYWFQQKPGQPPRTLIYDTSNKHSWTPARFSGSLLGGK |
| | AALTLSGAQPEDEAEYYCLLSYSGARVFGGGTKLTVL (SEQ ID NO: 511) |
| VL | ETTLTQSPATLSVSPGERATLSCRASQSVSSYLAWYQQKPGQAPRLLIYDASNRATGIPARFSGSGSGTDFT |
| | LTISSLEPEDFAVYYCQQRSNVIPQITFGQGTRLEIK (SEQ ID NO: 512) |
| VL | QTVVTQEPSLTVSPGGTVTLTCGSDTGAWSGHYPYWFQQKPGQAPRALIYDTGNKHSWTPARFSGSLLGGK |
| | AALTLSGAQPEDEAEYYCLLSYSGTRIFGGGTKLTVL (SEQ ID NO: 513) |
| VL | QSVLTQPPSASGTPGQRVTISCSGSSSNIGRRAVNWYQQLPGTAPKLLIYDNDRRPSGIPDRFSGSKSGTSA |
| | TLGITELQTGDEADYYCGTWDTNLSAGLFGGGTKLTVL (SEQ ID NO: 514) |
| VL | SGSSSNIGNNYVSWYQQLPGTAPKLLIYDNNKRPSGIPDRFSGSKSGTSATLGITGLQTGDEADYYCGTWDS |
| | SLSAGDWFGGGTKLTVL (SEQ ID NO: 515) |
| VL | AIQLTQSPGTLSLAPGERATLSCRASQSVSSSYIAWYQQRPGQAPRLLIYGASNRATDIPARFIGSGSGTDF |
| | TLTISSLEPEDFAVYYCQQRSNWPRNTFGQGTRLEIK (SEQ ID NO: 516) |
| VL | QTVVTQEPSLTVSPGGTVTLTCGSNTGAVTSGHYPYWFQQKPGQAPRTLIYDATNKQSWTPARFSGSLLGDK |
| | AALTLSGAQPEDEAEYYCLLSYSGVRVFGGGTKLTVL (SEQ ID NO: 517) |
| VL | QTVVTQEPSLTVSPGGTVTLTCGSSTGAVTSGHYPYWFQQKPGQAPRTLIYDTSNKHSWTPARFSGSLLGGK |
| | AALTLSGAQPEDEADYFCLLSSSGARVFGGGTKLTVL (SEQ ID NO: 518) |
| VL | QSVLTQPRSVSGSPGQSVTISCTGTSSDVGGYNLVSWYQQHPGKAPKLMIYDVHKRPSGTSTRFSGSKSGNT |
| | ASLTISGLQAEDEADYYCSSYRSGSTYVFGTGTKVTVL (SEQ ID NO: 519) |
| VL | SYELTQPRSVSGSPGQSVTISCTGTSSDVGGYKYVSWYQQHPGKAPKLMIYDVSKRPSGVSNRFSGSKSGNT |
| | ASLTISGLQAEDEADYYCSSYTSSSTYVFGTGTKVTVL (SEQ ID NO: 520) |
| VL | SYVLTQPASVSGSPGQSITISCTGTSSDVGNYNLVSWYQQHPGKAPKLLVYDVSNRPSGVSNRFSGSKSGNT |
| | ASLTISGLQAEDEADYYCSSYTTSSTYVFGIGTKVTVL (SEQ ID NO: 521) |
| VL | QSVLTQPASMSGSPGQSITISCTGTSSDVGTYDLVSWYQQYPGKAPKLLIYDVANRPSGVSNRFSGSKSGNT |
| | ASLTVSGLQAEDEADYYCSSYAGTKVYVFGTGTKVTVL (SEQ ID NO: 522) |
| VL | DVVMTQSPSSLSASVGDRVTITCFASQGIATNLAWFQQKPGKAPKSLIYAASSLQSGVPSKFSGSGSGTAFT |
| | LTISSLQAEDFGTYYCQQYNNYPYTFGQGTKVEIK (SEQ ID NO: 523) |
| VL | DIVMTQSPSSLSASVGDRVTITCPASQGISNSLAWYQQKSGKAPKLLLYAASGLESGVPSRFSGSGSGTDYT |
| | LTISSLQPBDFATYYCQQSYSMPLTFGGGTKVEIK (SEQ ID NO: 524) |
| VL | QPVLTQPASVSGSPGQSITISCTGTSSDVGGYNLVAWYQQHPGKAPKLMIYDVSKRPSGVSNRFSGSKSGNT |
| | ASLTISGLQAEDEADYYCSSYTSSSTSHYVFGTGTKVTVL (SEQ ID NO: 525) |
| VL | QAVLTQPASVSGSPGQSITISCTGTSSDVGSYNLVSWYQQHPGKAPKLMIYEVRKRPSGVSNRFSASKSGNT |
| | ASLTISGLQAEDEADYYCSSYTSSSTFVFFGAGTKLTVL (SEQ ID NO: 526) |
| VL | SYVLTQPASVSGSPGQSITISCTGTSSDVGGTNYVSWYQQHPGKAPKLMIFDVSNRPSGVSNRFSGSKSGNT |
| | ASLTISGLQAEDEADYYCSSYTSMRTLVFGGGTKLTVL (SEQ ID NO: 527) |
| VL | QAGLTQPPSASGSPGQSVTISCTGTSSDVGGYNSVSWYQQHPGKAPKLMIYDVSNRPSGVSNRFSGSKSGNT |
| | ASLTISGLQAEDEADYYCSSYINSGTLVFGGGTKLTVL (SEQ ID NO: 528) |
| VL | QSVLTQPASVSGSPGQSITISCTGTSADVGHYNLVSWYQQHPGKAPKLMIYDVTKRPSGVSTRFSGSKSGNT |
| | ASLTISGLQAEDESDYYCSSYTSSSTYVFGTGTKLTVL (SEQ ID NO: 529) |
| VL | EIVMTQSPSSLSASVGDRWITCRASRNIKTALAWFQQRPGQAPKSLIYAASSLHSGVTSRFSGSGFGTDFT |
| | LTINSLQPEDVATYYCQQYDSYPITFGQGTRLEIK (SEQ ID NO: 530) |
| VL | QAGLTQPASVSGSPGQWITISCTGTSSDVGAYNLVSWYQQYPGKAPKLMIYDVTKRPSGVSDRFSGSKSGNT |
| | ASLTISGLQAEDEADYYCSSYTSSTTYVFGTGTQLTVL (SEQ ID NO: 531) |
| VL | QPVLTQPRSVSGSPGQSVTISCTGTSSDVGGYNLVSWYQQHPGRAPKLMIYDVSDRPSGVSDRFSGSKSGNT |
| | ASLTISGLQAEDEADYYCSSFTSRTTPAYVFGTGTKLTVL (SEQ ID NO: 532) |
| VL | QSVVTQPPSVSAAPGQKVTISCSGSSSNIGNNYVSWYQQLPGTAPKLLIYDNNKRPSGIPDRFSGSKSGNTA |
| | SLTISGLQAEDEADYYCCSYAGSNTLIFGGGTKVTVL (SEQ ID NO: 533) |
| VL | QSVLTQPASVSGSPGQSITISCTGTSSDVGSYNLVSWYQQHPGKAPKLMIYDVSERPSGVPDRFSGSKSGNT |
| | ASLTISGLQAEDEADYYCSSYTSSSTLYVFGTGTKLTVL (SEQ ID NO: 534) |

Group F

| | |
|---|---|
| VH | MGWSCILFLVATATGSIVMTQTPTFLVVSAGDRVTITCPCASQSVINDVAWYQQKPGQSPKLLIFYASNRNTG |
| | VPDRFRGSGYGTDFRFTISTVQAEDLAVYFCQQDYSPPRTRGSGTK (SEQ ID NO: 535) |
| VH | MGWSCIILFLVATATGEVKLEESGGGLVQPGGSMKLSCVASGFTFSDAWMDWVRQSPEKGLEWVAEIRSKAN |
| | NHAPYYTESVKGRFTISRDDSKSIIYLQMNNLRAEDTGIYYCTRDSTATHWGQGT (SEQ ID NO: 535) |
| VL | MGWSCIILFLVATATGSIVMTQTPTFLWSAGDRVTITCKASQSVINDVAWYQQKPGQSPKLLIFYASNRNT |
| | GVPDRFTGSGYGTDFTFTISTVQAEDLAVYFCQQDYSPPFTFGSGTKLEIKRTVAAPSVFIFPPSDEQLKSG |
| | TASWCLLNNFYPREAKVQWKVDNALQSGNSQESVTEQDSKDSTYSLLSSTLTLSKADYEKHKWACEVTHQ |
| | GLSSPVTKSFNRGEC (SEQ ID NO: 536) |
| * | MGWSCIILFLVATATGEVKLEESGGGLVQPGGSMKLSCVASGFTFSDAWMDWVRQSPEKGLEWAEIRSKAN |
| HC | NHAPYYTESVKGRFTISRDDSKSIIYLQMNNLRAEDTFIYYCTRDSTATHWGQGTLVTVSAASTKGPSVFPL |
| | APSSKSTSGGTAALGCLVKDYFPEPVTVSWNSGALTSGVHTFPAVLQSSGLYSLSSVVTVPSSSLGTQTYIC |
| | NVNHKPSNTKVDKRVEPKSCDKTHTCPPCPAPELLGGPSVTXFPPKPKDTLMLSRTPEVTCVVVDVSHEDPE |
| | VKFNWYVDGVEVHNAKTKPREEQYNSTYRWSVLTVLTVLHQDWLNGKEYKCKVSNKALPAPIEKTISKAKG |
| | QPREPQVYTLPPSRDELTKNQVSLTCLVKGFYPSDIAVEWESNGQPENNYKTTPPVLDSDGSFFLYSKLTVD |
| | KSRWQQGNVFSCSVMHEALHNHYTQKSLSLSPGK (SEQ ID NO: 537) |

Group H

| | |
|---|---|
| VH | EVQLVESGGGLVQPGGSLRLSCAASGFTFSNFWMNWVRQAPGKGLEWVSEIRLKSNNYATHYAESVKGRFTI |
| | SRDDSKNTLYLQMNSLKTEDTAVYYCTSYDYEYWGQGTLVTVSA (SEQ ID NO: 538) |
| VH | EVQLVESGGGLVQPGGSLKLSCAASGFTFSNFWMNWVRQAPGKGLEWVAEIRLKSNNYATHYAESVKGRFTI |
| | SRDDSKNTLYLQMNSLRTEDTAVYYCTSYDYEYWGQGTLVTVSA (SEQ ID NO: 539) |
| VH | EVQLVESGGGLVQPGGSLKLSCAASGFTFSNFWMNWVRQAPGKGLEWVAEIRLKSNNYATHYAESVKGRFTI |
| | SRDDSKNTLYLQMNSLKTEDTAVYYCTSYDYEYWGQGTLVTVSA (SEQ ID NO: 539) |
| VL | DIQMTQSPSTLSASVGDRVTLSCKASENVGTYVSWYQQKPGKAPKLLIYGASNRYTGVPSRFTGSGSGTDFT |
| | LTISSLQPDDFATYYCGQSYSYPFTFGSGTKLEIK (SEQ ID NO: 540) |
| VL | DIQMTQSPASLSASVGDRVTISCKASENVGTYVSWYQQKPGQTPKLLIYGASNRYTGVPSRFSGSGSGTDFT |
| | LTISSLQPDDFATYYCGQSYSYPFTFGSGTKLEIK (SEQ ID NO: 541) |
| VL | DIQMTQSPSSLSASVGDRVTLTCKASENVGTYVSWYQQKPGQAPKLLIYGASNRYTGVPSRFTGSGSGTDFT |
| | LTISSLQPDDFATYYCGQSYSYPFTFGSGTKLEIK (SEQ ID NO: 542) |

Group I

| | |
|---|---|
| VH | EVQLVESGGGLVQPGGSLRLSCAASGFTFSDAWMDWVRQAPGKGLEWVGEIRSKANNHAPYYTESVKGRFTI |
| | SRDDSKMSLYLQMNSLKTEDTAVTYCARDSTATHWGRGTLVTVSS (SEQ ID NO: 543) |
| VL | AIQMTQSPSSLSASVGDRVTITCKASQSVINDVAWYQQKPGKAPKLLIYYASNRNTGVPSRFSGSGSGTDFT |
| | LTISSLQPEDFATYYCQQDYSPPFTFGPGTKVDIKR (SEQ ID NO: 544) |
| VL | EIVLTQSPATLSLSPGERATLSCKASQSVINDVAWYQQKPGQAPRLLIYYASNRNTGIPARFSGSGSGTDFT |
| | LTISSLEPEDFAVYYCQQDYSPPFTFGPGTKVDIKR (SEQ ID NO: 545) |

Group J

| | |
|---|---|
| VH | DIQMTQSPXXLSXSVGDRVTXXCKASENVGTYVSWYQQKPGXXPKLLIYGASNRYTGVPXRFTGXGSGTDFT |
| | LTISSLQXXDXATYYCGQSYSYPFTFGSGTKLEIK (SEQ ID NO: 580) |
| VL | EVQLXESGGGLVQPGGSLRLSCXASGFTFSNFWMNWVRQAPGKGLEWVXEIRLKSNNYATHYAESVKGRFTI |
| | SRDDSKXXLYLQMNSLXTEDTXVYYCTSYDYEYWGQGTLVTVSA (SEQ ID NO: 581) |

Group K

| | |
|---|---|
| VL | QVQLQESGGGSVQAGGSLRLSCAASGYTFSSSNCMGWFRQAPGKEREDVAIISVRGGITYYADSVKGRFTIS |
| | RDSAKNTLSLQMNSLKPEDTAVYYCAADNPKYRALSDAHCNWSYRYWGQGTQVTVS (SEQ ID |
| | NO: 582) |

Group L

| | |
|---|---|
| VH | QVQLVQSGAEVKEPGASVKVSCKASGYTFTSYGISWVRQAPGQGLEWMGWINPNSGGTNYAQKFQGRVTMTR |
| | DMSISTAYMELSRLRSDDTAVYYCARGRGSYYAFDIWGQGTMVTVSS (SEQ ID NO: 609) |
| VH | EVQLVESGGDLVKPGGSLKLSCAASGFTFSSYGMSWVRQTPDKRLEWVATISSGGSYTYYQDSIKGRFTISR |
| | DNAKNTLYLQMSSLKSEDTAMYYCSIGDWADYWGQGTTLTVSS (SEQ ID NO: 610) |
| VH | QVQLQQSGAELMKPGASVKISCKTSGYTFSTYWIEWVKQRPGHGPEWIGEFLPGSGSTNFNEKFKGPVATFTA |
| | DKSSDTAYMQLSSLTSEDSAVYYCTRSGGNFGARFASWGQGTLVTVSA (SEQ ID NO: 611) |
| LC* | DSVLTQPPSVSGAPRQTVTISCSGSSSNIGQNSVTWYQRLPGEAPKLLIYYDDLLHSGVSDRFSGSKSGTSA |
| | SLAISGLQSEDEAEYYCASWDDSLKGPVFGGGTKLTVLGQPKAAPSVTLFPPSSEELQANKATLVCLISDFY |
| | PGAVTVAWKADSSPVKAGVETTTPSKQSNNKYAASSYLSLTPEQWKSHKSYSCQVTHEGSTVEKTVAPTECS |
| | (SEQ ID NO: 612) |
| VL | DIQMTQSPDSLAVSLGERATINCKSSQSVLYSSNNKNYLAWYQQKPGQPPKLLIYWASTRESGVPDRFSGSG |
| | SGTDFTLTISSLQAEDVAVYYCQQYYSTPTFGQGTKVEIK (SEQ ID NO: 613) |
| VL | DIKMTQSPSSMYASLGERVTITCKASQDINSYLSWFQQKPGKSPKTLIHRANRLVAGVPSRFSGSGSGQVYS |
| | LTISSLEYEDMGIYFCLQYDEFPLTFGAGTKLELN (SEQ ID NO: 614) |
| VL | DIVMTQAAPSVPVTPGESVSISCRSSKSLLSNNGNTYLYWFLQRPGQSPHLLIYRMSSIASGVPDRFSGSGS |
| | GTAFTLRISRVEAEDVGVYYCMQHLEYPFTFGGGTKLEIK (SEQ ID NO: 615) |

*the indicated sequence provided in Group G designated as “HC” is a heavy chain amino acid sequence, and the indicated sequence provided in Group L designated as “LC” is a light chain amino acid sequence; all other sequences presented in Table 1 are variable heavy chain and variable light chain sequences.

[0116] In some embodiments, the CD147 antibody/activatable CD147 antibody includes a CDR sequence shown in Table 2, a combination of VL CDR sequences (VL CDR1, VL CDR2, VL CDR3) selected from the group consisting of those combinations shown in a single row Table 2, a combination of VH CDR sequences (VH CDR1, VH CDR2, VH CDR3) selected from the group consisting of those combinations shown in Table 2, or a combination of VL CDR and VH CDR sequences (VL CDR1, VL CDR2, VL CDR3, VH CDR1, VH CDR2, VH CDR3) selected the group consisting of those combinations shown in Table 2.

[0117] In some embodiments, the CD147 antibody/activatable CD147 antibody includes a combination of heavy chain CDR sequences selected from the group consisting of the combinations shown in Group A in Table 2. In some embodiments, the CD147 antibody/activatable CD147 antibody includes a combination of light chain CDR sequences selected from the group consisting of the combinations shown in Group A in Table 2. In some embodiments, the CD147 antibody/activatable CD147 antibody includes a combination of heavy chain CDR sequences selected from the group consisting of the combinations shown in Group A in Table 2, and a combination of light chain CDR sequences selected from the group consisting of the combinations shown in Group A in Table 2.

[0118] In some embodiments, the CD147 antibody/activatable CD147 antibody includes a combination of heavy chain CDR sequences selected from the group consisting of the combinations shown in Group B in Table 2. In some embodiments, the CD147 antibody/activatable CD147 antibody includes a combination of light chain CDR sequences selected from the group consisting of the combinations shown in Group B in Table 2. In some embodiments, the CD147 antibody/activatable CD147 antibody includes a combination of heavy chain CDR sequences selected from the group consisting of the combinations shown in Group B in Table 2, and a combination of light chain CDR sequences selected from the group consisting of the combinations shown in Group B in Table 2.

[0119] In some embodiments, the CD147 antibody/activatable CD147 antibody includes a combination of heavy chain CDR sequences selected from the group consisting of the combinations shown in Group C in Table 2. In some embodiments, the CD147 antibody/activatable CD147 antibody includes a combination of light chain CDR sequences selected from the group consisting of the combinations shown in Group C in Table 2. In some embodiments, the CD147 antibody/activatable CD147 antibody includes a combination of heavy chain CDR sequences selected from the group consisting of the combinations shown in Group C in Table 2, and a combination of light chain CDR sequences selected from the group consisting of the combinations shown in Group C in Table 2.

[0120] In some embodiments, the CD147 antibody/activatable CD147 antibody includes a combination of heavy chain CDR sequences selected from the Group E consisting of the combinations shown in Group E in Table 2. In some embodiments, the CD147 antibody/activatable CD147 antibody includes a combination of light chain CDR sequences selected from the Group E consisting of the combinations shown in Group E in Table 2. In some embodiments, the CD147 antibody/activatable CD147 antibody includes a combination of heavy chain CDR sequences selected from the Group E consisting of the combinations shown in Group E in Table 2, and a combination of light chain CDR sequences selected from the Group E consisting of the combinations shown in Group E in Table 2.

TABLE 2
CDR Sequences for Antibodies and Activatable Antibodies
that Bind CD147

| VH | | | VL | | |
|---|---|---|---|---|---|
| CDR1 | | CDR3 | | CDR2 | CDR3 |
| (SEQ ID | CDR2 | (SEQ ID | CDR1 | (SEQ ID | (SEQ ID |
| NO:) | (SEQ ID NO:) | NO:) | (SEQ ID NO:) | NO:) | NO:) |

Group A

| | | | | | |
|---|---|---|---|---|---|
| NFWMD | (G/E)IRLKS(Y/T)NY | (W/T)(D/S) | KASQ(D/S)VS(T/ | (S/Y)AS | QQ(H/D)YS |
| (546) | ATHYAESVKG (547) | (G/T)(A/G)Y | N)DVA (549) | (Y/N)RY | (TS)P(F/Y)T |
| | | (548) | | T (550) | (551) |
| NFWMD | GIRLKSYNYATHYAESV | WDGAY (553) | KASQDVSTDVA | SASYRYT | QQHYSTPFT |
| (546) | KG (552) | | (554) | (555) | (556) |
| NFWMD | EIRLKSTNIATHYAESV | TSTGY (558) | KASQSVSNDVA | YASNRYT | QQDYSSPYT |
| (546) | KG (557) | | (559) | (560) | (561) |
| DYWMN | IIDPSDSYASYNQKFKG | KSYYGGNYYYA | SVSSSINSINLH | GTSNLAS | QQWSSYPLT |
| (562) | (563) | MDY (564) | (565) | (566) | (567) |

Group B

| | | | | | |
|---|---|---|---|---|---|
| GFTFSNFW | EIRLKSNNYATHYAES | YDYEY (570) | KASENVGTYVS | GASNRYT | GQSYSYPFT |
| MN (568) | VKG (569) | | (571) | (572) | (573) |

Group C

| | | | | | |
|---|---|---|---|---|---|
| DAWMD | EIRSKANNHAPYYTES | DSTATH | KASQSVINDVA | YASNRNT | QQDYSPPFT |
| (574) | VKG (575) | (576) | (577) | (578) | (579) |

Group D

| | | |
|---|---|---|
| GYTFSSSNCM | SVRGGIT | AADNPKRALS |
| (583) | (584) | DAHCNWSYRY |
| | | (585) |

Group E

| | | | | | |
|---|---|---|---|---|---|
| SYGIS | WINPNSGGTNYAQKFQ | GRGSYYAFDI | KSSQSVLYSSNNKN | WASTRES | QQYYSTPT |
| (586) | G (587) | (588) | YLA (589) | (590) | (591) |
| SGGYYWS | YIYYSGSTYYNPSLKS | DRGTGDAFDI | SGSSSNIGQNSVT | YDDLLHS | ASWDDSLKGP |
| (592) | (593) | (593) | (594) | (595) | V (596) |
| SYGMS | TISSGGSYTYYQDSIK | GDWADY | KASQDINSYLS | RANRLVA | LQYDEFPLT |
| (597) | G (598) | (599) | (600) | (601) | (602) |
| TYWIE | EFLPGSGSTNFNEKFK | SGGNFGARFAS | RSSKSLLSNNGNTY | RMSSLAS | MQHLEYPFT |
| (603) | G (604) | (605) | LY (606) | (607) | (608) |

[0121] In some embodiments, the CD147 antibody/activatable CD147 antibody comprises or is derived from an antibody that is manufactured, secreted or otherwise produced by a hybridoma, such as, for example, the hybridoma(s) disclosed in U.S. Pat. No. 5,330,896 and deposited at ATCC under deposit number HB 8214.

[0122] In some embodiments, the CD147 antibody/activatable CD147 antibody comprises or is derived from an antibody that is manufactured, secreted or otherwise produced by a hybridoma, such as, for example, the hybridoma(s) designated BA120 as disclosed in U.S. Pat. No. 7,736,647 and deposited at the Collection Nationale de Cultures de Microorganismes (CNCM) (Institut Pasteur, Paris, France, 25, Rue du Docteur Roux, F-75724, Paris, Cedex 15) on Jun. 14, 2005, under number CNCM I-3449; the hybridoma(s) disclosed in U.S. Pat. No. 7,572,895 and deposited at the ATCC under PTA-6055; the hybridoma(s) disclosed in PCT Publication No. WO 2014/020140 and WO 2005/111082 and deposited with CNCM on May 10 2001, under number 1-2665; the hybridoma(s) disclosed in U.S. Pat. No. 4,434,156 and deposited at the ATCC under HB-8094; the hybridoma(s) disclosed in U.S. Pat. No. 5,648,469 and deposited at the ATCC under HB-11011 and HB-11010.

[0123] In some embodiments, the CD147 antibody/activatable CD147 antibody includes a heavy chain that comprises or is derived from a heavy chain amino acid sequence shown in PCT Publication Nos. WO 2014/144060, WO 2014/189973, WO 2014/020140, in U.S. Pat. Nos. 8,663,598; 8,129,503; 7,736,647; 7,572,895; 4,434,156; in US Patent Application Publication Nos. US2014114054, US20140212423, US2013177579, US2013045206, US20130216476, US20120282176, and/or in Chinese Patent No. CN101245107B, the contents of each of which are hereby incorporated by reference in their entirety.

[0124] The disclosure also provides methods for producing a CD147 AB of the disclosure by culturing a cell under conditions that lead to expression of the antibody or fragment thereof, wherein the cell comprises a nucleic acid molecule of the disclosure or a vector of the disclosure.

[0125] In some embodiments, the CD147 antibody or antigen-binding fragment thereof is encoded by a nucleic acid sequence that comprises a nucleic acid sequence encoding a heavy chain amino acid sequence comprising an amino acid sequence selected from the group consisting of SEQ ID NOs: 1-4. In some embodiments, the antibody or antigen-binding fragment thereof is encoded by a nucleic acid sequence that comprises a nucleic acid sequence encoding a heavy chain amino acid sequence comprising an amino acid sequence selected from the group consisting of SEQ ID NOs: 1-3.

[0126] In some embodiments, the CD147 antibody or antigen-binding fragment thereof is encoded by a nucleic acid sequence that comprises a nucleic acid sequence encoding a light chain amino acid sequence comprising an amino acid sequence selected from the group consisting of SEQ ID NOs: 5-9. In some embodiments, the antibody or antigen-binding fragment thereof is encoded by a nucleic acid sequence that comprises a nucleic acid sequence encoding a light chain amino acid sequence comprising an amino acid sequence selected from the group consisting of SEQ ID NOs: 5-8.

[0127] In some embodiments, the CD147 antibody or antigen-binding fragment thereof is encoded by a nucleic acid sequence that comprises a nucleic acid sequence encoding a heavy chain amino acid sequence comprising an amino acid sequence selected from the group consisting of SEQ ID NOs: 1-4, and a nucleic acid sequence encoding a light chain amino acid sequence comprising an amino acid sequence selected from the group consisting of SEQ ID NOs: 5-9.

[0128] In some embodiments, the CD147 antibody or antigen-binding fragment thereof is encoded by a nucleic acid sequence that comprises a nucleic acid sequence encoding a heavy chain amino acid sequence comprising an amino acid sequence selected from the group consisting of SEQ ID NOs: 1-3, and a nucleic acid sequence encoding a light chain amino acid sequence comprising an amino acid sequence selected from the group consisting of SEQ ID NOs: 5-8.

[0129] In some embodiments, the CD147 antibody or antigen-binding fragment thereof is encoded by a nucleic acid sequence that comprises a nucleic acid sequence that is at least 90%, 91%, 92%, 93%, 94%, 95%, 96%, 97%, 98% or 99% identical to a nucleic acid sequence encoding a heavy chain amino acid sequence comprising an amino acid sequence selected from the group consisting of SEQ ID NOs: 1-4. In some embodiments, the antibody or antigen-binding fragment thereof is encoded by a nucleic acid sequence that comprises a nucleic acid sequence that is at least 90%, 91%, 92%, 93%, 94%, 95%, 96%, 97%, 98% or 99% identical to a nucleic acid sequence encoding a heavy chain amino acid sequence comprising an amino acid sequence selected from the group consisting of SEQ ID NOs: 1-3.

[0130] In some embodiments, the CD147 antibody or antigen-binding fragment thereof is encoded by a nucleic acid sequence that comprises a nucleic acid sequence that is at least 90%, 91%, 92%, 93%, 94%, 95%, 96%, 97%, 98% or 99% identical to a nucleic acid sequence encoding a light chain amino acid sequence comprising an amino acid sequence selected from the group consisting of SEQ ID NOs: 5-9. In some embodiments, the antibody or antigen-binding fragment thereof is encoded by a nucleic acid sequence that comprises a nucleic acid sequence that is at least 90%, 91%, 92%, 93%, 94%, 95%, 96%, 97%, 98% or 99% identical to a nucleic acid sequence encoding a light chain amino acid sequence comprising an amino acid sequence selected from the group consisting of SEQ ID NOs: 5-8.

[0131] In some embodiments, the CD147 antibody or antigen-binding fragment thereof is encoded by a nucleic acid sequence that comprises a nucleic acid sequence that is at least 90%, 91%, 92%, 93%, 94%, 95%, 96%, 97%, 98% or 99% identical to a nucleic acid sequence encoding a heavy chain amino acid sequence comprising an amino acid sequence selected from the group consisting of SEQ ID NOs: 1-4, and a nucleic acid sequence that is at least 90%, 91%, 92%, 93%, 94%, 95%, 96%, 97%, 98% or 99% identical to a nucleic acid sequence encoding a light chain amino acid sequence comprising an amino acid sequence selected from the group consisting of SEQ ID NOs: 5-9.

[0132] In some embodiments, the CD147 antibody or antigen-binding fragment thereof is encoded by a nucleic acid sequence that comprises a nucleic acid sequence that is at least 90%, 91%, 92%, 93%, 94%, 95%, 96%, 97%, 98% or 99% identical to a nucleic acid sequence encoding a heavy chain amino acid sequence comprising an amino acid sequence selected from the group consisting of SEQ ID NOs: 1-3, and a nucleic acid sequence that is at least 90%, 91%, 92%, 93%, 94%, 95%, 96%, 97%, 98% or 99% identical to a nucleic acid sequence encoding a light chain amino acid sequence comprising an amino acid sequence selected from the group consisting of SEQ ID NOs: 5-8.

[0133] Activatable CD147 Antibodies

[0134] As described above, the disclosure also provides activatable antibodies that include an antibody or antigen-binding fragment thereof that specifically binds CD147 coupled to a masking moiety (MM), such that coupling of the MM reduces the ability of the antibody or antigen-binding fragment thereof to bind CD147. In some embodiments, the MM is coupled via a sequence that includes a substrate for a protease (CM, cleavable moiety), for example, a protease that is active in diseased tissue and/or a protease that is co-localized with CD147 at a treatment site in a subject. The activatable CD147 antibodies provided herein are stable in circulation, activated at intended sites of therapy and/or diagnosis but not in normal, e.g., healthy tissue or other tissue not targeted for treatment and/or diagnosis, and, when activated, exhibit binding to CD147 that is at least comparable to the corresponding, unmodified antibody, also referred to herein as the parental antibody.

[0135] The activatable CD147 antibodies described herein overcome a limitation of antibody therapeutics, particularly antibody therapeutics that are known to be toxic to at least some degree in vivo. Target-mediated toxicity constitutes a major limitation for the development of therapeutic antibodies. The activatable CD147 antibodies provided herein are designed to address the toxicity associated with the inhibition of the target in normal tissues by traditional therapeutic antibodies. These activatable CD147 antibodies remain masked until proteolytically activated at the site of disease. Starting with a CD147 antibody as a parental therapeutic antibody, the activatable CD147 antibodies of the invention were engineered by coupling the antibody to an inhibitory mask through a linker that incorporates a protease substrate.

[0136] As used herein, the term cleaved state of the activatable antibody refers to the condition of the activatable antibodies following modification of the CM by at least one protease. The term uncleaved state, as used herein, refers to the condition of the activatable antibodies in the absence of cleavage of the CM by a protease. As discussed above, the term “activatable antibodies” is used herein to refer to an activatable antibody in both its uncleaved (native) state, as well as in its cleaved state. It will be apparent to the ordinarily skilled artisan that in some embodiments a cleaved activatable antibody may lack an MM due to cleavage of the CM by protease, resulting in release of at least the MM (e.g., where the MM is not joined to the activatable antibodies by a covalent bond (e.g., a disulfide bond between cysteine residues).

[0137] By activatable or switchable is meant that the activatable antibody exhibits a first level of binding to a target when the activatable antibody is in a inhibited, masked or uncleaved state (i.e., a first conformation), and a second level of binding to the target in the uninhibited, unmasked and/or cleaved state (i.e., a second conformation), where the second level of target binding is greater than the first level of binding. In general, the access of target to the AB of the activatable antibody is greater in the presence of a cleaving agent capable of cleaving the CM, i.e., a protease, than in the absence of such a cleaving agent. Thus, when the activatable antibody is in the uncleaved state, the AB is inhibited from target binding and can be masked from target binding (i.e., the first conformation is such the AB cannot bind the target), and in the cleaved state the AB is not inhibited or is unmasked to target binding.

[0138] The CM and AB of the activatable antibodies are selected so that the AB represents a binding moiety for a given target, and the CM represents a substrate for a protease. In some embodiments, the protease is co-localized with the target at a treatment site or diagnostic site in a subject. As used herein, co-localized refers to being at the same site or relatively close nearby. In some embodiments, a protease cleaves a CM yielding an activated antibody that binds to a target located nearby the cleavage site. The activatable antibodies disclosed herein find particular use where, for example, a protease capable of cleaving a site in the CM, i.e., a protease, is present at relatively higher levels in target-containing tissue of a treatment site or diagnostic site than in tissue of non-treatment sites (for example in healthy tissue). In some embodiments, a CM of the disclosure is also cleaved by one or more other proteases. In some embodiments, it is the one or more other proteases that is co-localized with the target and that is responsible for cleavage of the CM in vivo.

[0139] In some embodiments activatable antibodies provide for reduced toxicity and/or adverse side effects that could otherwise result from binding of the AB at non-treatment sites if the AB were not masked or otherwise inhibited from binding to the target.

[0140] In general, an activatable antibody can be designed by selecting an AB of interest (such as any CD147 antibody or fragment thereof described herein) and constructing the remainder of the activatable antibody so that, when conformationally constrained, the MM provides for masking of the AB or reduction of binding of the AB to its target. Structural design criteria can be to be taken into account to provide for this functional feature.

[0141] Activatable antibodies exhibiting a switchable phenotype of a desired dynamic range for target binding in an inhibited versus an uninhibited conformation are provided. Dynamic range generally refers to a ratio of (a) a maximum detected level of a parameter under a first set of conditions to (b) a minimum detected value of that parameter under a second set of conditions. For example, in the context of an activatable antibody, the dynamic range refers to the ratio of (a) a maximum detected level of target protein binding to an activatable antibody in the presence of at least one protease capable of cleaving the CM of the activatable antibodies to (b) a minimum detected level of target protein binding to an activatable antibody in the absence of the protease. The dynamic range of an activatable antibody can be calculated as the ratio of the dissociation constant of an activatable antibody cleaving agent (e.g., enzyme) treatment to the dissociation constant of the activatable antibodies cleaving agent treatment. The greater the dynamic range of an activatable antibody, the better the switchable phenotype of the activatable antibody. Activatable antibodies having relatively higher dynamic range values (e.g., greater than 1) exhibit more desirable switching phenotypes such that target protein binding by the activatable antibodies occurs to a greater extent (e.g., predominantly occurs) in the presence of a cleaving agent (e.g., enzyme) capable of cleaving the CM of the activatable antibodies than in the absence of a cleaving agent.

[0142] As described above, the activatable CD147 antibodies provided herein include a masking moiety (MM). In some embodiments, the masking moiety is an amino acid sequence that is coupled or otherwise attached to the CD147 antibody and is positioned within the activatable CD147 antibody construct such that the masking moiety reduces the ability of the CD147 antibody to specifically bind CD147. Suitable masking moieties are identified using any of a variety of known techniques. For example, peptide masking moieties are identified using the methods described in PCT Publication No. WO 2009/025846 by Daugherty et al., the contents of which are hereby incorporated by reference in their entirety.

[0143] As described above, the activatable CD147 antibodies provided herein include a cleavable moiety (CM). In some embodiments, the cleavable moiety includes an amino acid sequence that is a substrate for a protease, usually an extracellular protease. Suitable substrates are identified using any of a variety of known techniques. For example, peptide substrates are identified using the methods described in U.S. Pat. No. 7,666,817 by Daugherty et al.; in U.S. Pat. No. 8,563,269 by Stagliano et al.; and in PCT Publication No. WO 2014/026136 by La Porte et al., the contents of each of which are hereby incorporated by reference in their entirety. (See also Boulware et al. “Evolutionary optimization of peptide substrates for proteases that exhibit rapid hydrolysis kinetics.” Biotechnol Bioeng. 106.3 (2010): 339-46).

[0144] Exemplary substrates include but are not limited to substrates cleavable by one or more of the following enzymes or proteases listed in Table 3.

TABLE 3
Exemplary Proteases and/or Enzymes

| | | |
|---|---|---|
| ADAMS, ADAMTS, e.g. | Cysteine proteinases, e.g., | Serine proteases, e.g, |
| ADAM8 | Cruzipain | activated protein C |
| ADAM9 | Legumain | Cathepsin A |
| ADAM10 | Otubain-2 | Cathepsin G |
| ADAM12 | | Chymase |
| ADAM15 | KLKs, e.g., | coagulation factor proteases |
| ADAM17/TACE | KLK4 | (e.g., FVIIa, FIXa, FXa, FXIa, |
| ADAMDEC1 | KLK5 | FXIIa) |
| ADAMTS1 | KLK6 | Elastase |
| ADAMTS4 | KLK7 | Granzyme B |
| ADAMTS5 | KLK8 | Guanidinobenzoatse |
| | KLK10 | HtrA1 |
| Aspartate proteases, e.g., | KLK11 | Human Neutrophil Elastase |
| BACE | KLK13 | Lactoferrin |
| Renin | KLK14 | Marapsin |
| | | NS3/4A |
| Aspartic cathepsins, e.g., | Metallo proteinases, e.g., | PACE4 |
| Cathepsin D | Meprin | Plasmin |
| Cathepsin E | Neprilysin | PSA |
| | PSMA | tPA |
| Caspases, e.g., | BMP-1 | Thrombin |
| Caspase 1 | | Tryptase |
| Caspase 2 | MMPs, e.g., | uPA |
| Caspase 3 | MMP1 | |
| Caspase 4 | MMP2 | Type II Transmembrane |
| Caspase 5 | MMP3 | Serine Proteases (TTSPs), e.g., |
| Caspase 6 | MMP7 | DESC1 |
| Caspase 7 | MMP8 | DPP-4 |
| Caspase 8 | MMP9 | FAP |
| Caspase 9 | MMP10 | Hepsin |
| Caspase 10 | MMP11 | Matriptase-2 |
| Caspase 14 | MMP12 | MT-SP1/Matriptase |
| | MMP13 | TMPRSS2 |
| Cysteine cathepsins, e.g., | MMP14 | TMPRSS3 |
| Cathepsin B | MMP15 | TMPRSS4 |
| Cathepsin C | MMP16 | |
| Cathepsin K | MMP17 | |
| Cathepsin L | MMP19 | |
| Cathepsin S | MMP20 | |
| Cathepsin V12 | MMP23 | |
| Cathepsin X/Z/p | MMP24 | |
| | MMP26 | |
| | MMP27 | |

[0145] The activatable antibodies in an activated state bind CD147 and include (i) an antibody or an antigen binding fragment thereof (AB) that specifically binds to CD147; (ii) a masking moiety (MM) that, when the activatable antibody is in an uncleaved state, inhibits the binding of the AB to CD147; and (c) a cleavable moiety (CM) coupled to the AB, wherein the CM is a polypeptide that functions as a substrate for a protease.

[0146] In some embodiments, the activatable antibody in the uncleaved state has the structural arrangement from N-terminus to C-terminus as follows: MM-CM-AB or AB-CM-MM.

[0147] In some embodiments, the activatable antibody comprises a linking peptide between the MM and the CM.

[0148] In some embodiments, the activatable antibody comprises a linking peptide between the CM and the AB.

[0149] In some embodiments, the activatable antibody comprises a first linking peptide (LP1) and a second linking peptide (LP2), and wherein the activatable antibody in the uncleaved state has the structural arrangement from N-terminus to C-terminus as follows: MM-LP1-CM-LP2-AB or AB-LP2-CM-LP1-MM. In some embodiments, the two linking peptides need not be identical to each other.

[0150] In some embodiments, at least one of LP1 or LP2 comprises an amino acid sequence selected from the group consisting of (GS)ₙ, (GGS)ₙ, (GSGGS)ₙ (SEQ ID NO: 339) and (GGGS)ₙ (SEQ ID NO: 340), where n is an integer of at least one.

[0151] In some embodiments, at least one of LP1 or LP2 comprises an amino acid sequence selected from the group consisting of GGSG (SEQ ID NO: 341), GGSGG (SEQ ID NO: 342), GSGSG (SEQ ID NO: 343), GSGGG (SEQ ID NO: 344), GGGSG (SEQ ID NO: 345), and GSSSG (SEQ ID NO: 346).

[0152] In some embodiments, LP1 comprises the amino acid sequence GSSGGSGGSGGSG (SEQ ID NO: 347), GSSGGSGGSGG (SEQ ID NO: 348), GSSGGSGGSGGS (SEQ ID NO: 349), GSSGGSGGSGGSGGGS (SEQ ID NO: 350), GSSGGSGGSG (SEQ ID NO: 351), or GSSGGSGGSGS (SEQ ID NO: 352).

[0153] In some embodiments, LP2 comprises the amino acid sequence GSS, GGS, GGGS (SEQ ID NO: 353), GSSGT (SEQ ID NO: 354) or GSSG (SEQ ID NO: 355).

[0154] In some embodiments, the antibody or antigen-binding fragment thereof that binds CD147 is a monoclonal antibody, domain antibody, single chain, Fab fragment, a F(ab′)₂ fragment, a scFv, a scAb, a dAb, a single domain heavy chain antibody, or a single domain light chain antibody. In some embodiments, such an antibody or antigen-binding fragment thereof that binds CD147 is a mouse, other rodent, chimeric, humanized or fully human monoclonal antibody.

[0155] In some embodiments, the activatable antibody in an uncleaved state specifically binds to the mammalian CD147 with a dissociation constant less than or equal to 1 nM, less than or equal to 5 nM, less than or equal to 10 nM, less than or equal to 15 nM, less than or equal to 20 nM, less than or equal to 25 nM, less than or equal to 50 nM, less than or equal to 100 nM, less than or equal to 150 nM, less than or equal to 250 nM, less than or equal to 500 nM, less than or equal to 750 nM, less than or equal to 1000 nM, and/or less than or equal to 2000 nM.

[0156] In some embodiments, the activatable antibody in an uncleaved state specifically binds to the mammalian CD147 with a dissociation constant in the range of 1 nM to 2000 nM, 1 nM to 1000 nM, 1 nM to 750 nM, 1 nM to 500 nM, 1 nM to 250 nM, 1 nM to 150 nM, 1 nM to 100 nM, 1 nM to 50 nM, 1 nM to 25 nM, 1 nM to 15 nM, 1 nM to 10 nM, 1 nM to 5 nM, 5 nM to 2000 nM, 5 nM to 1000 nM, 5 nM to 750 nM, 5 nM to 500 nM, 5 nM to 250 nM, 5 nM to 150 nM, 5 nM to 100 nM, 5 nM to 50 nM, 5 nM to 25 nM, 5 nM to 15 nM, 5 nM to 10 nM, 10 nM to 2000 nM, 10 nM to 1000 nM, 10 nM to 750 nM, 10 nM to 500 nM, 10 nM to 250 nM, 10 nM to 150 nM, 10 nM to 100 nM, 10 nM to 50 nM, 10 nM to 25 nM, 10 nM to 15 nM, 15 nM to 2000 nM, 15 nM to 1000 nM, 15 nM to 750 nM, 15 nM to 500 nM, 15 nM to 250 nM, 15 nM to 150 nM, 15 nM to 100 nM, 15 nM to 50 nM, 15 nM to 25 nM, 25 nM to 2000 nM, 25 nM to 1000 nM, 25 nM to 750 nM, 25 nM to 500 nM, 25 nM to 250 nM, 25 nM to 150 nM, 25 nM to 100 nM, 25 nM to 50 nM, 50 nM to 2000 nM, 50 nM to 1000 nM, 50 nM to 750 nM, 50 nM to 500 nM, 50 nM to 250 nM, 50 nM to 150 nM, 50 nM to 100 nM, 100 nM to 2000 nM, 100 nM to 1000 nM, 100 nM to 750 nM, 100 nM to 500 nM, 100 nM to 250 nM, 100 nM to 150 nM, 150 nM to 2000 nM, 150 nM to 1000 nM, 150 nM to 750 nM, 150 nM to 500 nM, 150 nM to 250 nM, 250 nM to 2000 nM, 250 nM to 1000 nM, 250 nM to 750 nM, 250 nM to 500 nM, 500 nM to 2000 nM, 500 nM to 1000 nM, 500 nM to 750 nM, 500 nM to 500 nM, 500 nM to 250 nM, 500 nM to 150 nM, 500 nM to 100 nM, 500 nM to 50 nM, 750 nM to 2000 nM, 750 nM to 1000 nM, or 1000 nM to 2000 nM.

[0157] In some embodiments, the activatable antibody in an activated state specifically binds to the mammalian CD147 with a dissociation constant is less than or equal to 0.01 nM, 0.05 nM, 0.1 nM, 0.5 nM, 1 nM, 5 nM, or 10 nM.

[0158] In some embodiments, the activatable antibody in an activated state specifically binds to the mammalian CD147 with a dissociation constant in the range of 0.01 nM to 100 nM, 0.01 nM to 10 nM, 0.01 nM to 5 nM, 0.01 nM to 1 nM, 0.01 to 0.5 nM, 0.01 nm to 0.1 nM, 0.01 nm to 0.05 nM, 0.05 nM to 100 nM, 0.05 nM to 10 nM, 0.05 nM to 5 nM, 0.05 nM to 1 nM, 0.05 to 0.5 nM, 0.05 nm to 0.1 nM, 0.1 nM to 100 nM, 0.1 nM to 10 nM, 0.1 nM to 5 nM, 0.1 nM to 1 nM, 0.1 to 0.5 nM, 0.5 nM to 100 nM, 0.5 nM to 10 nM, 0.5 nM to 5 nM, 0.5 nM to 1 nM, 1 nM to 100 nM, 1 nM to 10 nM, 1 nM to 5 nM, 5 nM to 100 nM, 5 nM to 10 nM, or 10 nM to 100 nM.

[0159] When the AB is modified with a MM and is in the presence of the target, specific binding of the AB to its target is reduced or inhibited, as compared to the specific binding of the AB not modified with an MM or the specific binding of the parental AB to the target.

[0160] The K_{d} of the AB modified with a MM towards the CD147 target is at least 5, 10, 25, 50, 100, 250, 500, 1,000, 2,500, 5,000, 10,000, 50,000, 100,000, 500,000, 1,000,000, 5,000,000, 10,000,000, 50,000,000 or greater, or between 5-10, 10-100, 10-1,000, 10-10,000, 10-100,000, 10-1,000,000, 10-10,000,000, 100-1,000, 100-10,000, 100-100,000, 100-1,000,000, 100-10,000,000, 1,000-10,000, 1,000-100,000, 1,000-1,000,000, 1000-10,000,000, 10,000-100,000, 10,000-1,000,000, 10,000-10,000,000, 100,000-1,000,000, or 100,000-10,000,000 times greater than the K_{d} of the AB not modified with an MM or of the parental AB towards the CD147 target. Conversely, the binding affinity of the AB modified with a MM towards the CD147 target is at least 2, 3, 4, 5, 10, 25, 50, 100, 250, 500, 1,000, 2,500, 5,000, 10,000, 50,000, 100,000, 500,000, 1,000,000, 5,000,000, 10,000,000, 50,000,000 or greater, or between 5-10, 10-100, 10-1,000, 10-10,000, 10-100,000, 10-1,000,000, 10-10,000,000, 100-1,000, 100-10,000, 100-100,000, 100-1,000,000, 100-10,000,000, 1,000-10,000, 1,000-100,000, 1,000-1,000,000, 1000-10,000,000, 10,000-100,000, 10,000-1,000,000, 10,000-10,000,000, 100,000-1,000,000, or 100,000-10,000,000 times lower than the binding affinity of the AB not modified with an MM or of the parental AB towards the CD147 target.

[0161] The dissociation constant (K_{d}) of the MM towards the AB is generally greater than the K_{d} of the AB towards the CD147 target. The K_{d} of the MM towards the AB can be at least 5, 10, 25, 50, 100, 250, 500, 1,000, 2,500, 5,000, 10,000, 100,000, 1,000,000 or even 10,000,000 times greater than the K_{d} of the AB towards the CD147 target. Conversely, the binding affinity of the MM towards the AB is generally lower than the binding affinity of the AB towards the CD147 target. The binding affinity of MM towards the AB can be at least 5, 10, 25, 50, 100, 250, 500, 1,000, 2,500, 5,000, 10,000, 100,000, 1,000,000 or even 10,000,000 times lower than the binding affinity of the AB towards the CD147 target.

[0162] In some embodiments, the dissociation constant (K_{d}) of the MM towards the AB is approximately equal to the K_{d} of the AB towards the CD147 target. In some embodiments, the dissociation constant (K_{d}) of the MM towards the AB is no more than the dissociation constant of the AB towards the CD147 target. In some embodiments, the dissociation constant (K_{d}) of the MM towards the AB is equivalent to the dissociation constant of the AB towards the CD147 target.

[0163] In some embodiments, the dissociation constant (K_{d}) of the MM towards the AB is less than the dissociation constant of the AB towards the CD147 target.

[0164] In some embodiments, the dissociation constant (K_{d}) of the MM towards the AB is greater than the dissociation constant of the AB towards the CD147 target.

[0165] In some embodiments, the MM has a K_{d} for binding to the AB that is no more than the K_{d} for binding of the AB to the target.

[0166] In some embodiments, the MM has a K_{d} for binding to the AB that is no less than the K_{d} for binding of the AB to the target.

[0167] In some embodiments, the MM has a K_{d} for binding to the AB that is approximately equal to the K_{d} for binding of the AB to the target.

[0168] In some embodiments, the MM has a K_{d} for binding to the AB that is less than the K_{d} for binding of the AB to the target.

[0169] In some embodiments, the MM has a K_{d} for binding to the AB that is greater than the K_{d} for binding of the AB to the target.

[0170] In some embodiments, the MM has a K_{d} for binding to the AB that is no more than 2, 3, 4, 5, 10, 25, 50, 100, 250, 500, or 1,000 fold greater than the K_{d} for binding of the AB to the target. In some embodiments, the MM has a K_{d} for binding to the AB that is between 1-5, 2-5, 2-10, 5-10, 5-20, 5-50, 5-100, 10-100, 10-1,000, 20-100, 20-1000, or 100-1,000 fold greater than the K_{d} for binding of the AB to the target.

[0171] In some embodiments, the MM has an affinity for binding to the AB that is less than the affinity of binding of the AB to the target.

[0172] In some embodiments, the MM has an affinity for binding to the AB that is no more than the affinity of binding of the AB to the target.

[0173] In some embodiments, the MM has an affinity for binding to the AB that is approximately equal of the affinity of binding of the AB to the target.

[0174] In some embodiments, the MM has an affinity for binding to the AB that is no less than the affinity of binding of the AB to the target.

[0175] In some embodiments, the MM has an affinity for binding to the AB that is greater than the affinity of binding of the AB to the target.

[0176] In some embodiments, the MM has an affinity for binding to the AB that is 2, 3, 4, 5, 10, 25, 50, 100, 250, 500, or 1,000 less than the affinity of binding of the AB to the target. I In some embodiments, the MM has an affinity for binding to the AB that is between 1-5, 2-5, 2-10, 5-10, 5-20, 5-50, 5-100, 10-100, 10-1,000, 20-100, 20-1000, or 100-1,000 fold less than the affinity of binding of the AB to the target. In some embodiments, the MM has an affinity for binding to the AB that is 2 to 20 fold less than the affinity of binding of the AB to the target. In some embodiments, a MM not covalently linked to the AB and at equimolar concentration to the AB does not inhibit the binding of the AB to the target.

[0177] When the AB is modified with a MM and is in the presence of the target specific binding of the AB to its target is reduced or inhibited, as compared to the specific binding of the AB not modified with an MM or the specific binding of the parental AB to the target. When compared to the binding of the AB not modified with an MM or the binding of the parental AB to the target the AB's ability to bind the target when modified with an MM can be reduced by at least 50%, 60%, 70%, 80%, 90%, 92%, 93%, 94%, 95%, 96%, 97%, 98%, 99% and even 100% for at least 2, 4, 6, 8, 12, 28, 24, 30, 36, 48, 60, 72, 84, or 96 hours, or 5, 10, 15, 30, 45, 60, 90, 120, 150, or 180 days, or 1, 2, 3, 4, 5, 6, 7, 8, 9, 10, 11, or 12 months or more when measured in vivo or in an in vitro assay.

[0178] The MM inhibits the binding of the AB to the target. The MM binds the antigen binding domain of the AB and inhibits binding of the AB to the target. The MM can sterically inhibit the binding of the AB to the target. The MM can allosterically inhibit the binding of the AB to its target. In these embodiments when the AB is modified or coupled to a MM and in the presence of target there is no binding or substantially no binding of the AB to the target, or no more than 0.001%, 0.01%, 0.1%, 1%, 2° %, 3%, 4%, 5%, 6%, 7%, 8%, 9%, 10%, 15%, 20%, 25%, 30%, 35%, 40%, or 50% binding of the AB to the target, as compared to the binding of the AB not modified with an MM, the parental AB, or the AB not coupled to an MM to the target, for at least 2, 4, 6, 8, 12, 28, 24, 30, 36, 48, 60, 72, 84, or 96 hours, or 5, 10, 15, 30, 45, 60, 90, 120, 150, or 180 days, or 1, 2, 3, 4, 5, 6, 7, 8, 9, 10, 11, or 12 months or longer when measured in vivo or in an in vitro assay.

[0179] When an AB is coupled to or modified by a MM, the MM ‘masks’ or reduces or otherwise inhibits the specific binding of the AB to the target. When an AB is coupled to or modified by a MM, such coupling or modification can effect a structural change that reduces or inhibits the ability of the AB to specifically bind its target.

[0180] An AB coupled to or modified with an MM can be represented by the following formulae (in order from an amino (N) terminal region to carboxyl (C) terminal region:
[0181] (MM)-(AB)
[0182] (AB)-(MM)
[0183] (MM)-L-(AB)
[0184] (AB)-L-(MM)
   where MM is a masking moiety, the AB is an antibody or antibody fragment thereof, and the L is a linker. In many embodiments, it can be desirable to insert one or more linkers, e.g., flexible linkers, into the composition so as to provide for flexibility.

[0185] In certain embodiments, the MM is not a natural binding partner of the AB. In some embodiments, the MM contains no or substantially no homology to any natural binding partner of the AB. In some embodiments, the MM is no more than 5%, 10%, 15%, 20%, 25%, 30%, 35%, 40%, 45%, 50%, 55%, 60%, 65%, 70%, 75%, or 80 similar to any natural binding partner of the AB. In some embodiments, the MM is no more than 5%, 10%, 15%, 20%, 250%, 30%, 35%, 40%, 45%, 50%, 55%, 60%, 65%, 70%, 75%, or 80% identical to any natural binding partner of the AB. In some embodiments, the MM is no more than 25% identical to any natural binding partner of the AB. In some embodiments, the MM is no more than 50% identical to any natural binding partner of the AB. In some embodiments, the MM is no more than 20% identical to any natural binding partner of the AB. In some embodiments, the MM is no more than 10% identical to any natural binding partner of the AB.

[0186] In some embodiments, the activatable antibodies include an AB that is modified by an MM and also includes one or more cleavable moieties (CM). Such activatable antibodies exhibit activatable/switchable binding, to the AB's target. Activatable antibodies generally include an antibody or antibody fragment (AB), modified by or coupled to a masking moiety (MM) and a modifiable or cleavable moiety (CM). In some embodiments, the CM contains an amino acid sequence that serves as a substrate for at least one protease.

[0187] The elements of the activatable antibodies are arranged so that the MM and CM are positioned such that in a cleaved (or relatively active) state and in the presence of a target, the AB binds a target while the activatable antibody is in an uncleaved (or relatively inactive) state in the presence of the target, specific binding of the AB to its target is reduced or inhibited. The specific binding of the AB to its target can be reduced due to the inhibition or masking of the AB's ability to specifically bind its target by the MM.

[0188] The K_{d} of the AB modified with a MM and a CM towards the CD147 target is at least 5, 10, 25, 50, 100, 250, 500, 1,000, 2,500, 5,000, 10,000, 50,000, 100,000, 500,000, 1,000,000, 5,000,000, 10,000,000, 50,000,000 or greater, or between 5-10, 10-100, 10-1,000, 10-10,000, 10-100,000, 10-1,000,000, 10-10,000,000, 100-1,000, 100-10,000, 100-100,000, 100-1,000,000, 100-10,000,000, 1,000-10,000, 1,000-100,000, 1,000-1,000,000, 1000-10,000,000, 10,000-100,000, 10,000-1,000,000, 10,000-10,000,000, 100,000-1,000,000, or 100,000-10,000,000 times greater than the K_{d} of the AB not modified with an MM and a CM or of the parental AB towards the CD147 target. Conversely, the binding affinity of the AB modified with a MM and a CM towards the CD147 target is at least 5, 10, 25, 50, 100, 250, 500, 1,000, 2,500, 5,000, 10,000, 50,000, 100,000, 500,000, 1,000,000, 5,000,000, 10,000,000, 50,000,000 or greater, or between 5-10, 10-100, 10-1,000, 10-10,000, 10-100,000, 10-1,000,000, 10-10,000,000, 100-1,000, 100-10,000, 100-100,000, 100-1,000,000, 100-10,000,000, 1,000-10,000, 1,000-100,000, 1,000-1,000,000, 1000-10,000,000, 10,000-100,000, 10,000-1,000,000, 10,000-10,000,000, 100,000-1,000,000, or 100,000-10,000,000 times lower than the binding affinity of the AB not modified with an MM and a CM or of the parental AB towards the CD147 target.

[0189] When the AB is modified with a MM and a CM and is in the presence of the target but not in the presence of a modifying agent (for example at least one protease), specific binding of the AB to its target is reduced or inhibited, as compared to the specific binding of the AB not modified with an MM and a CM or of the parental AB to the target. When compared to the binding of the parental AB or the binding of an AB not modified with an MM and a CM to its target, the AB's ability to bind the target when modified with an MM and a CM can be reduced by at least 50%, 60%, 70%, 8%, 90%, 92%, 93%, 94%, 95%, 960%, 97%, 98%, 99% and even 100% for at least 2, 4, 6, 8, 12, 28, 24, 30, 36, 48, 60, 72, 84, or 96 hours or 5, 10, 15, 30, 45, 60, 90, 120, 150, or 180 days, or 1, 2, 3, 4, 5, 6, 7, 8, 9, 10, 11, or 12 months or longer when measured in vivo or in an in vitro assay.

[0190] Activatable antibodies can be provided in a variety of structural configurations. Exemplary formulae for activatable antibodies are provided below. It is specifically contemplated that the N- to C-terminal order of the AB, MM and CM can be reversed within an activatable antibody. It is also specifically contemplated that the CM and MM may overlap in amino acid sequence, e.g., such that the CM is contained within the MM.

[0191] For example, activatable antibodies can be represented by the following formula (in order from an amino (N) terminal region to carboxyl (C) terminal region:
[0192] (MM)-(CM)-(AB)
[0193] (AB)-(CM)-(MM)
   where MM is a masking moiety, CM is a cleavable moiety, and AB is an antibody or fragment thereof. It should be noted that although MM and CM are indicated as distinct components in the formulae above, in all exemplary embodiments (including formulae) disclosed herein it is contemplated that the amino acid sequences of the MM and the CM could overlap, e.g., such that the CM is completely or partially contained within the MM. In addition, the formulae above provide for additional amino acid sequences that can be positioned N-terminal or C-terminal to the activatable antibodies elements.

[0194] In certain embodiments, the MM is not a natural binding partner of the AB. In some embodiments, the MM contains no or substantially no homology to any natural binding partner of the AB. In some embodiments, the MM is no more than 5%, 10%, 15%, 20%, 250%, 30%, 35%, 40%, 45%, 50%, 55%, 60%, 65%, 70%, 75%, or 80% similar to any natural binding partner of the AB. In some embodiments, the MM is no more than 5%, 10%, 15%, 20%, 25%, 30%, 35%, 40%, 45%, 50%, 55%, 60%, 65%, 70%⁰, 75%, or 80% identical to any natural binding partner of the AB. In some embodiments, the MM is no more than 50% identical to any natural binding partner of the AB. In some embodiments, the MM is no more than 25% identical to any natural binding partner of the AB. In some embodiments, the MM is no more than 20% identical to any natural binding partner of the AB. In some embodiments, the MM is no more than 10% identical to any natural binding partner of the AB.

[0195] In many embodiments it may be desirable to insert one or more linkers, e.g., flexible linkers, into the activatable antibody construct so as to provide for flexibility at one or more of the MM-CM junction, the CM-AB junction, or both. For example, the AB, MM, and/or CM may not contain a sufficient number of residues (e.g., Gly, Ser, Asp, Asn, especially Gly and Ser, particularly Gly) to provide the desired flexibility. As such, the switchable phenotype of such activatable antibody constructs may benefit from introduction of one or more amino acids to provide for a flexible linker. In addition, as described below, where the activatable antibody is provided as a conformationally constrained construct, a flexible linker can be operably inserted to facilitate formation and maintenance of a cyclic structure in the uncleaved activatable antibody.

[0196] For example, in certain embodiments an activatable antibody comprises one of the following formulae (where the formula below represent an amino acid sequence in either N- to C-terminal direction or C- to N-terminal direction):
[0197] (MM)-L1-(CM)-(AB)
[0198] (MM)-(CM)-L2-(AB)
[0199] (MM)-L1-(CM)-L2-(AB)
   wherein MM, CM, and AB are as defined above; wherein L1 and L2 are each independently and optionally present or absent, are the same or different flexible linkers that include at least 1 flexible amino acid (e.g., Gly). In addition, the formulae above provide for additional amino acid sequences that can be positioned N-terminal or C-terminal to the activatable antibodies elements. Examples include, but are not limited to, targeting moieties (e.g., a ligand for a receptor of a cell present in a target tissue) and serum half-life extending moieties (e.g., polypeptides that bind serum proteins, such as immunoglobulin (e.g., IgG) or serum albumin (e.g., human serum albumin (HAS)).

[0200] The CM is specifically cleaved by at least one protease at a rate of about 0.001-1500×10⁴ M⁻¹S⁻¹ or at least 0.001, 0.005, 0.01, 0.05, 0.1, 0.5, 1, 2.5, 5, 7.5, 10, 15, 20, 25, 50, 75, 100, 125, 150, 200, 250, 500, 750, 1000, 1250, or 1500×10⁴ M⁻¹S⁻¹. In some embodiments, the CM is specifically cleaved at a rate of about 100,000 M⁻¹S⁻¹. In some embodiments, the CM is specifically cleaved at a rate from about 1×10E2 to about 1×10E6 M⁻¹S⁻¹ (i.e., from about 1×10² to about 1×10⁶ M⁻¹S⁻¹).

[0201] For specific cleavage by an enzyme, contact between the enzyme and CM is made. When the activatable antibody comprising an AB coupled to a MM and a CM is in the presence of target and sufficient enzyme activity, the CM can be cleaved. Sufficient enzyme activity can refer to the ability of the enzyme to make contact with the CM and effect cleavage. It can readily be envisioned that an enzyme may be in the vicinity of the CM but unable to cleave because of other cellular factors or protein modification of the enzyme.

[0202] Linkers suitable for use in compositions described herein are generally ones that provide flexibility of the modified AB or the activatable antibodies to facilitate the inhibition of the binding of the AB to the target. Such linkers are generally referred to as flexible linkers. Suitable linkers can be readily selected and can be of any of a suitable of different lengths, such as from 1 amino acid (e.g., Gly) to 20 amino acids, from 2 amino acids to 15 amino acids, from 3 amino acids to 12 amino acids, including 4 amino acids to 10 amino acids, 5 amino acids to 9 amino acids, 6 amino acids to 8 amino acids, or 7 amino acids to 8 amino acids, and can be 1, 2, 3, 4, 5, 6, 7, 8, 9, 10, 11, 12, 13, 14, 15, 16, 17, 18, 19, or 20 amino acids in length.

[0203] Exemplary flexible linkers include glycine polymers (G)n, glycine-serine polymers (including, for example, (GS)n, (GSGGS)n (SEQ ID NO: 339) and (GGGS)n (SEQ ID NO: 340), where n is an integer of at least one), glycine-alanine polymers, alanine-serine polymers, and other flexible linkers known in the art. Glycine and glycine-serine polymers are relatively unstructured, and therefore may be able to serve as a neutral tether between components. Glycine accesses significantly more phi-psi space than even alanine, and is much less restricted than residues with longer side chains (see Scheraga, Rev. Computational Chem. 11173-142 (1992)). Exemplary flexible linkers include, but are not limited to Gly-Gly-Ser-Gly (SEQ ID NO: 341), Gly-Gly-Ser-Gly-Gly (SEQ ID NO: 342), Gly-Ser-Gly-Ser-Gly (SEQ ID NO: 343), Gly-Ser-Gly-Gly-Gly (SEQ ID NO: 344), Gly-Gly-Gly-Ser-Gly (SEQ ID NO: 345), Gly-Ser-Ser-Ser-Gly (SEQ ID NO: 346), and the like. The ordinarily skilled artisan will recognize that design of an activatable antibodies can include linkers that are all or partially flexible, such that the linker can include a flexible linker as well as one or more portions that confer less flexible structure to provide for a desired activatable antibodies structure.

[0204] The disclosure also provides compositions and methods that include an activatable CD147 antibody that includes an antibody or antibody fragment (AB) that specifically binds CD147, where the AB is coupled to a masking moiety (MM) that decreases the ability of the AB to bind its target. In some embodiments, the activatable CD147 antibody further includes a cleavable moiety (CM) that is a substrate for a protease. The compositions and methods provided herein enable the attachment of one or more agents to one or more cysteine residues in the AB without compromising the activity (e.g., the masking, activating or binding activity) of the activatable CD147 antibody. In some embodiments, the compositions and methods provided herein enable the attachment of one or more agents to one or more cysteine residues in the AB without reducing or otherwise disturbing one or more disulfide bonds within the MM. The compositions and methods provided herein produce an activatable CD147 antibody that is conjugated to one or more agents, e.g., any of a variety of therapeutic, diagnostic and/or prophylactic agents, for example, in some embodiments, without any of the agent(s) being conjugated to the MM of the activatable CD147 antibody. The compositions and methods provided herein produce conjugated activatable CD147 antibodies in which the MM retains the ability to effectively and efficiently mask the AB of the activatable antibody in an uncleaved state. The compositions and methods provided herein produce conjugated activatable CD147 antibodies in which the activatable antibody is still activated, i.e., cleaved, in the presence of a protease that can cleave the CM.

[0205] In some embodiments, the activatable antibody comprises a heavy chain variable region amino acid sequence selected from the group consisting of SEQ ID NOs: 1-4. In some embodiments, the activatable antibody comprises a heavy chain variable region amino acid sequence selected from the group consisting of SEQ ID NOs: 1-3.

[0206] In some embodiments, the activatable antibody comprises a light chain variable region amino acid sequence selected from the group consisting of SEQ ID NOs: 5-9. In some embodiments, the activatable antibody comprises a light chain variable region amino acid sequence selected from the group consisting of SEQ ID NOs: 5-8.

[0207] In some embodiments, the activatable antibody comprises a heavy chain variable region amino acid sequence selected from the group consisting of SEQ ID NOs: 1-4, and a light chain variable region amino acid sequence selected from the group consisting of SEQ ID NOs: 5-9.

[0208] In some embodiments, the activatable antibody comprises a heavy chain variable region amino acid sequence selected from the group consisting of SEQ ID NOs: 1-3, and a light chain variable region amino acid sequence selected from the group consisting of SEQ ID NOs: 5-8.

[0209] In some embodiments, the activatable antibody comprises a heavy chain variable region amino acid sequence that is at least 90%, 91%, 92%, 93%, 94%, 95%, 96%, 97%, 98% or 99% identical to an amino acid sequence selected from the group consisting of SEQ ID NOs: 1-4. In some embodiments, the activatable antibody comprises a heavy chain variable region amino acid sequence that is at least 90%, 91%, 92%, 93%, 94%, 95%, 96%, 97%, 98% or 99% identical to an amino acid sequence selected from the group consisting of SEQ ID NOs: 1-3.

[0210] In some embodiments, the activatable antibody comprises a light chain variable region amino acid sequence that is at least 90%, 91%, 92%, 93%, 94%, 95%, 96%, 97%, 98% or 99% identical to an amino acid sequence selected from the group consisting of SEQ ID NOs: 5-9. In some embodiments, the activatable antibody comprises a light chain variable region amino acid sequence that is at least 90%, 91%, 92%, 93%, 94%, 95%, 96%, 97%, 98% or 99% identical to an amino acid sequence selected from the group consisting of SEQ ID NOs: 5-8.

[0211] In some embodiments, the activatable antibody comprises a heavy chain variable region amino acid sequence that is at least 90%, 91%, 92%, 93%, 94%, 95%, 96%, 97%, 98% or 99% identical to an amino acid sequence selected from the group consisting of SEQ ID NOs: 1-4, and a light chain variable region amino acid sequence that is at least 90%, 91%, 92%, 93%, 94%, 95%, 96%, 97%, 98% or 99% identical to an amino acid sequence selected from the group consisting of SEQ ID NOs: 5-9.

[0212] In some embodiments, the activatable antibody comprises a heavy chain variable region amino acid sequence that is at least 90%, 91%, 92%, 93%, 94%, 95%, 96%, 97%, 98% or 99% identical to an amino acid sequence selected from the group consisting of SEQ ID NOs: 1-3, and a light chain variable region amino acid sequence that is at least 90%, 91%, 92%, 93%, 94%, 95%, 96%, 97%, 98% or 99% identical to an amino acid sequence selected from the group consisting of SEQ ID NOs: 5-8.

[0213] In some embodiments, the activatable antibody comprises a combination of a variable heavy chain complementarity determining region 1 (VH CDR1, also referred to herein as CDRH1) sequence, a variable heavy chain complementarity determining region 2 (VH CDR2, also referred to herein as CDRH2) sequence, a variable heavy chain complementarity determining region 3 (VH CDR3, also referred to herein as CDRH3) sequence, a variable light chain complementarity determining region 1 (VL CDR1, also referred to herein as CDRL1) sequence, a variable light chain complementarity determining region 2 (VL CDR2, also referred to herein as CDRL2) sequence, and a variable light chain complementarity determining region 3 (VL CDR3, also referred to herein as CDRL3) sequence, wherein at least one CDR sequence is selected from the group consisting of a VH CDR1 sequence comprising the amino acid sequence GFTFSNYWMN (SEQ ID NO: 10) or GFTFSNYWMD (SEQ ID NO: 11); a VH CDR2 sequence comprising the amino acid sequence EIRLKSYNYATH (SEQ ID NO: 12); a VH CDR3 sequence comprising the amino acid sequence AGTDY (SEQ ID NO: 13); a VL CDR1 sequence comprising the amino acid sequence KASQSVRTDVA (SEQ ID NO: 14) or RASQSVRTDVG (SEQ ID NO: 15); a VL CDR2 sequence comprising the amino acid sequence YSSNRYT (SEQ ID NO: 16); and a VL CDR3 sequence comprising the amino acid sequence QQDYSSPFT (SEQ ID NO: 17) or QQDYSSPYT (SEQ ID NO: 18).

[0214] In some embodiments, the activatable antibody comprises a combination of a VH CDR1 sequence, a VH CDR2 sequence, a VH CDR3 sequence, a VL CDR1 sequence, a VL CDR2 sequence, and a VL CDR3 sequence, wherein at least one CDR sequence is selected from the group consisting of a VH CDR1 sequence that includes a sequence that is at least 90%, 91%, 92%, 93%, 94%, 95%, 96%, 97%, 98%, 99% or more identical to a VH CDR1 sequence comprising the amino acid sequence GFTFSNYWMN (SEQ ID NO: 10) or GFTFSNYWMD (SEQ ID NO: 11); a VH CDR2 sequence that includes a sequence that is at least 90%, 91%, 92%, 93%, 94%, 95%, 96%, 97%, 98%, 99% or more identical to a VH CDR2 sequence comprising the amino acid sequence EIRLKSYNYATH (SEQ ID NO: 12); a VH CDR3 sequence that includes a sequence that is at least 90%, 91%, 92%, 93%, 94%, 95%, 96%, 97%, 98%, 99% or more identical to a VH CDR3 sequence comprising the amino acid sequence AGTDY (SEQ ID NO: 13); a VL CDR1 sequence that includes a sequence that is at least 90%6, 91%, 92%, 93%, 94%, 95%, 96%, 97%, 98%, 99% or more identical to a VL CDR1 sequence comprising the amino acid sequence KASQSVRTDVA (SEQ ID NO: 14) or RASQSVRTDVG (SEQ ID NO: 15); a VL CDR2 sequence that includes a sequence that is at least 90%, 91%, 92%, 93%, 94%, 95%, 96%, 97%, 98%, 99% or more identical to a VL CDR2 sequence comprising the amino acid sequence YSSNRYT (SEQ ID NO: 16); and a VL CDR3 sequence that includes a sequence that is at least 90%, 91%, 92%, 93%, 94%, 95%, 96%, 97%, 98%, 99% or more identical to a VL CDR3 sequence comprising the amino acid sequence QQDYSSPFT (SEQ ID NO: 17) or QQDYSSPYT (SEQ ID NO: 18).

[0215] In some embodiments, the activatable antibody comprises a combination of a VH CDR1 sequence, a VH CDR2 sequence, a VH CDR3 sequence, a VL CDR1 sequence, a VL CDR2 sequence, and a VL CDR3 sequence, wherein the VH CDR1 sequence comprises the amino acid sequence GFTFSNYWMN (SEQ ID NO: 10) or GFTFSNYWMD (SEQ ID NO: 11); the VH CDR2 sequence comprises the amino acid sequence EIRLKSYNYATH (SEQ ID NO: 12); the VH CDR3 sequence comprises the amino acid sequence AGTDY (SEQ ID NO: 13); the VL CDR1 sequence comprises the amino acid sequence KASQSVRTDVA (SEQ ID NO: 14) or RASQSVRTDVG (SEQ ID NO: 15); the VL CDR2 sequence comprises the amino acid sequence YSSNRYT (SEQ ID NO: 16); and the VL CDR3 sequence comprises the amino acid sequence QQDYSSPFT (SEQ ID NO: 17) or QQDYSSPYT (SEQ ID NO: 18).

[0216] In some embodiments, the activatable antibody comprises a combination of a VH CDR1 sequence, a VH CDR2 sequence, a VH CDR3 sequence, a VL CDR1 sequence, a VL CDR2 sequence, and a VL CDR3 sequence, wherein the VH CDR1 sequence comprises a sequence that is at least 90%, 91%, 92%, 93%, 94%, 95%, 96%, 97%, 98%, 99% or more identical to the amino acid sequence GFTFSNYWMN (SEQ ID NO: 10) or GFTFSNYWMD (SEQ ID NO: 11); the VH CDR2 sequence comprises a sequence that is at least 90%, 91%, 92%, 93%, 94%, 95%, 96%, 97%, 98%, 99%, or more identical to the amino acid sequence EIRLKSYNYATH (SEQ ID NO: 12); the VH CDR3 sequence comprises a sequence that is at least 90%, 91%, 92%, 93%, 94%, 95%, 96%, 97%, 98%, 99% or more identical to the amino acid sequence AGTDY (SEQ ID NO: 13); the VL CDR1 sequence comprises a sequence that is at least 90%, 91%, 92%, 93%, 94%, 95%, 96%, 97%, 98%, 99% or more identical to the amino acid sequence KASQSVRTDVA (SEQ ID NO: 14) or RASQSVRTDVG (SEQ ID NO: 15); the VL CDR2 sequence comprises a sequence that is at least 90%, 91%, 92%, 93%, 94%, 95%, 96%, 97%, 98%, 99% or more identical to the amino acid sequence YSSNRYT (SEQ ID NO: 16); and the VL CDR3 sequence comprises a sequence that is at least 90%, 91%, 92%, 93%, 94%, 95%, 96%, 97%, 98%, 99% or more identical to the amino acid sequence QQDYSSPFT (SEQ ID NO: 17) or QQDYSSPYT (SEQ ID NO: 18).

[0217] In some embodiments, the AB of the activatable CD147 antibody comprises a heavy chain variable region amino acid sequence selected from the group consisting of the heavy chain variable region sequences shown in Table 1. In some embodiments, the AB of the activatable CD147 antibody comprises a light chain variable region amino acid sequence selected from the group consisting of the light chain variable region sequences shown in Table 1. In some embodiments, the AB of the activatable CD147 antibody comprises a heavy chain variable region amino acid sequence selected from the group consisting of the heavy chain variable region sequences shown in Table 1 and a light chain variable region amino acid sequence selected from the group consisting of the light chain variable region sequences shown in Table 1.

[0218] In some embodiments, the AB of the activatable CD147 antibody comprises a heavy chain variable region amino acid sequence that is at least 90%, 91%, 92%, 93%, 94%, 95° %, 96%, 97%, 98% or 99% identical to an amino acid sequence selected from the group consisting of the heavy chain variable region sequences shown in Table 1. In some embodiments, the AB of the activatable CD147 antibody comprises a light chain variable region amino acid sequence that is at least 90%, 91%, 92%, 93%, 94%, 95%, 96%, 97%, 98% or 99% identical to an amino acid sequence selected from the group consisting of the light chain variable region sequences shown in Table 1. In some embodiments, the AB of the activatable CD147 antibody comprises a heavy chain variable region amino acid sequence that is at least 90%, 91%, 92%, 93%, 94%, 95%, 96%, 97%, 98% or 99% identical to an amino acid sequence selected from the group consisting of the heavy chain variable region sequences shown in Table 1 and a light chain variable region amino acid sequence that is at least 90%, 91%, 92%, 93%, 94%, 95%, 96%, 97%, 98% or 99% identical to an amino acid sequence selected from the group consisting of the light chain variable region sequences shown in Table 1.

[0219] In some embodiments, the activatable antibody comprises a combination of a variable heavy chain complementarity determining region 1 (VH CDR1, also referred to herein as CDRH1) sequence, a variable heavy chain complementarity determining region 2 (VH CDR2, also referred to herein as CDRH2) sequence, a variable heavy chain complementarity determining region 3 (VH CDR3, also referred to herein as CDRH3) sequence, a variable light chain complementarity determining region 1 (VL CDR1, also referred to herein as CDRL1) sequence, a variable light chain complementarity determining region 2 (VL CDR2, also referred to herein as CDRL2) sequence, and a variable light chain complementarity determining region 3 (VL CDR3, also referred to herein as CDRL3) sequence, wherein at least one CDR sequence is selected from the group consisting of a VH CDR1 sequence shown in Table 2; a VH CDR2 sequence shown in Table 2; a VH CDR3 sequence shown in Table 2; a VL CDR1 sequence shown in Table 2; a VL CDR2 sequence shown in Table 2; and a VL CDR3 sequence shown in Table 2.

[0220] In some embodiments, the activatable antibody comprises a combination of a VH CDR1 sequence, a VH CDR2 sequence, a VH CDR3 sequence, a VL CDR1 sequence, a VL CDR2 sequence, and a VL CDR3 sequence, wherein at least one CDR sequence is selected from the group consisting of a VH CDR1 sequence that includes a sequence that is at least 90%, 91%, 92%, 93%, 94%, 95%, 96%, 97%, 98%, 99% or more identical to a VH CDR1 sequence shown in Table 2; a VH CDR2 sequence that includes a sequence that is at least 90%, 91%, 92%, 93%, 94%, 95%, 96%, 97%, 98%, 99% or more identical to a VH CDR2 sequence shown in Table 2; a VH CDR3 sequence that includes a sequence that is at least 90%, 91%, 92%, 93%, 94%, 95%, 96%, 97%, 98%, 99% or more identical to a VH CDR3 sequence shown in Table 2; a VL CDR1 sequence that includes a sequence that is at least 90%, 91%, 92%, 93%, 94%, 95%, 96%, 97%, 98%, 99% or more identical to a VL CDR1 sequence shown in Table 2; a VL CDR2 sequence that includes a sequence that is at least 90%, 91%, 92%, 93%, 94%, 95%, 96%, 97%, 98%, 99% or more identical to a VL CDR2 sequence shown in Table 2; and a VL CDR3 sequence that includes a sequence that is at least 90%, 91%, 92%, 93%, 94/O, 95%, 96%, 97%, 98%, 99% or more identical to a VL CDR3 sequence shown in Table 2.

[0221] In some embodiments, the activatable antibody comprises a combination of a VH CDR1 sequence, a VH CDR2 sequence, a VH CDR3 sequence, a VL CDR1 sequence, a VL CDR2 sequence, and a VL CDR3 sequence, wherein the combination is a combination of the six CDR sequences (VH CDR1, VH CDR2, VH CDR3, VL CDR1, VL CDR2, and VL CDR3) shown in a single row in Table 2.

[0222] In some embodiments, the activatable antibody comprises a heavy chain that comprises a combination of a VH CDR1 sequence, a VH CDR2 sequence, and a VH CDR3 sequence, wherein the combination is a combination of the three heavy chain CDR sequences (VH CDR1, VH CDR2, VH CDR3) shown in a single row in Table 2.

[0223] In some embodiments, the activatable antibody comprises a light chain that comprises a combination of a VL CDR sequence, a VL CDR2 sequence, and a VL CDR3 sequence, wherein the combination is a combination of the three light chain CDR sequences (VL CDR1, VL CDR2, VL CDR3) shown in a single row in Table 2.

[0224] In some embodiments, the activatable antibody comprises a combination of a VH CDR1 sequence, a VH CDR2 sequence, a VH CDR3 sequence, a VL CDR1 sequence, a VL CDR2 sequence, and a VL CDR3 sequence, wherein each CDR sequence in the combination comprises a sequence that is at least 90%, 91%, 92%, 93%, 94%, 95%, 96%, 97%, 98%, 99% or more identical to the corresponding CDR sequence in a combination of the six CDR sequences (VH CDR1, VH CDR2, VH CDR3, VL CDR1, VL CDR2, and VL CDR3) shown in a single row in Table 2.

[0225] In some embodiments, the activatable antibody comprises a heavy chain variable region that comprises a combination of a VH CDR1 sequence, a VH CDR2 sequence, and a VH CDR3 sequence, wherein each CDR sequence in the combination comprises a sequence that is at least 90%, 91%, 92%, 93%, 94%, 95%, 96%, 97%, 98%, 99% or more identical to the corresponding CDR sequence in a combination of three heavy chain CDR sequences (VH CDR1, VH CDR2, VH CDR3) shown in a single row in Table 2.

[0226] In some embodiments, the activatable antibody comprises a light chain variable region that comprises a combination of a VL CDR1 sequence, a VL CDR2 sequence, and a VL CDR3 sequence, wherein each CDR sequence in the combination comprises a sequence that is at least 90%, 91%, 92%, 93%, 94%, 95%, 96%, 97%, 98%, 99% or more identical to the corresponding CDR sequence in a combination of three light chain CDR sequences (VL CDR1, VL CDR2, VL CDR3) shown in a single row in Table 2.

[0227] In some embodiments, the MM has a dissociation constant for binding to the AB which is greater than the dissociation constant of the AB to CD147.

[0228] In some embodiments, the MM has a dissociation constant for binding to the AB which is no more than the dissociation constant of the AB to CD147.

[0229] In some embodiments, the MM has a dissociation constant for binding to the AB is equivalent to the dissociation constant of the AB to CD147.

[0230] In some embodiments, the MM has a dissociation constant for binding to the AB which is less than the dissociation constant of the AB to CD147.

[0231] In some embodiments, the dissociation constant (K_{d}) of the MM towards the AB is no more than 2, 3, 4, 5, 10, 25, 50, 100, 250, 500, 1,000, 2,500, 5,000, 10,000, 50,000, 100,000, 500,000, 1,000,000, 5,000,000, 10,000,000, 50,000,000 times or greater, or between 1-5, 5-10, 10-100, 10-1,000, 10-10,000, 10-100,000, 10-1,000,000, 10-10,000,000, 100-1,000, 100-10,000, 100-100,000, 100-1,000,000, 100-10,000,000, 1,000-10,000, 1,000-100,000, 1,000-1,000,000, 1000-10,000,000, 10,000-100,000, 10,000-1,000,000, 10,000-10,000,000, 100,000-1,000,000, or 100,000-10,000,000 times or greater than the dissociation constant of the AB towards the CD147 target.

[0232] In some embodiments, the MM does not interfere or compete with the AB for binding to CD147 when the activatable antibody is in a cleaved state.

[0233] In some embodiments, the MM is a polypeptide of about 2 to 40 amino acids in length. In some embodiments, the MM is a polypeptide of up to about 40 amino acids in length.

[0234] In some embodiments, the MM polypeptide sequence is different from that of CD147. In some embodiments, the MM polypeptide sequence is no more than 50% identical to any natural binding partner of the AB. In some embodiments, the MM polypeptide sequence is different from that of CD147 and is no more than 40%, 30%, 25%, 20%, 15%, or 10% identical to any natural binding partner of the AB.

[0235] In some embodiments, the coupling of the MM to the AB reduces the ability of the AB to bind CD147 such that the dissociation constant (K_{d}) of the AB when coupled to the MM towards CD147 is at least two times greater than the K_{d} of the AB when not coupled to the MM towards CD147.

[0236] In some embodiments, the coupling of the MM to the AB reduces the ability of the AB to bind CD147 such that the dissociation constant (K_{d}) of the AB when coupled to the MM towards CD147 is at least five times greater than the K_{d} of the AB when not coupled to the MM towards CD147.

[0237] In some embodiments, the coupling of the MM to the AB reduces the ability of the AB to bind CD147 such that the dissociation constant (K_{d}) of the AB when coupled to the MM towards CD147 is at least 10 times greater than the K_{d} of the AB when not coupled to the MM towards CD147.

[0238] In some embodiments, the coupling of the MM to the AB reduces the ability of the AB to bind CD147 such that the dissociation constant (K_{d}) of the AB when coupled to the MM towards CD147 is at least 20 times greater than the K_{d} of the AB when not coupled to the MM towards CD147.

[0239] In some embodiments, the coupling of the MM to the AB reduces the ability of the AB to bind CD147 such that the dissociation constant (K_{d}) of the AB when coupled to the MM towards CD147 is at least 40 times greater than the K_{d} of the AB when not coupled to the MM towards CD147.

[0240] In some embodiments, the coupling of the MM to the AB reduces the ability of the AB to bind CD147 such that the dissociation constant (K_{d}) of the AB when coupled to the MM towards CD147 is at least 100 times greater than the K_{d} of the AB when not coupled to the MM towards CD147.

[0241] In some embodiments, the coupling of the MM to the AB reduces the ability of the AB to bind CD147 such that the dissociation constant (K_{d}) of the AB when coupled to the MM towards CD147 is at least 1000 times greater than the K_{d} of the AB when not coupled to the MM towards CD147.

[0242] In some embodiments, the coupling of the MM to the AB reduces the ability of the AB to bind CD147 such that the dissociation constant (K_{d}) of the AB when coupled to the MM towards CD147 is at least 10,000 times greater than the K_{d} of the AB when not coupled to the MM towards CD147.

[0243] In some embodiments, in the presence of CD147, the MM reduces the ability of the AB to bind CD147 by at least 90% when the CM is uncleaved, as compared to when the CM is cleaved when assayed in vitro using a target displacement assay such as, for example, the assay described in PCT Publication No. WO 2010/081173, the contents of which are hereby incorporated by reference in their entirety.

[0244] In some embodiments, MM comprises an amino acid sequence selected from the group consisting of SEQ ID NO: 30-100. In some embodiments, the MM comprises an amino acid sequence selected from the group consisting of SEQ ID NOs: 30, 31, 33, 44, 46, 75-80, 82, 83, 86-89, and 90-100. In some embodiments, the MM comprises an amino acid sequence selected from the group consisting of SEQ ID NOs: 30, 31, 33, 44, 46, 75, 76, 77, 78, 79, 80, 82, 83, 86, 87, 88, 89, 90, 91, 92, 93, 94, 96, 97, 98, 99, and 100,

[0245] In some embodiments, the protease that cleaves the CM is active, e.g., up-regulated or otherwise unregulated, in diseased tissue, and the protease cleaves the CM in the activatable antibody when the activatable antibody is exposed to the protease.

[0246] In some embodiments, the protease is co-localized with CD147 in a tissue, and the protease cleaves the CM in the activatable antibody when the activatable antibody is exposed to the protease.

[0247] In some embodiments, the CM is positioned in the activatable antibody such that when the activatable antibody is in the uncleaved state, binding of the activatable antibody to CD147 is reduced to occur with a dissociation constant that is at least twofold greater than the dissociation constant of an unmodified AB binding to CD147, whereas in the cleaved state (i.e., when the activatable antibody is in the cleaved state), the AB binds CD147.

[0248] In some embodiments, the CM is positioned in the activatable antibody such that when the activatable antibody is in the uncleaved state, binding of the activatable antibody to CD147 is reduced to occur with a dissociation constant that is at least fivefold greater than the dissociation constant of an unmodified AB binding to CD147, whereas in the cleaved state (i.e., when the activatable antibody is in the cleaved state), the AB binds CD147.

[0249] In some embodiments, the CM is positioned in the activatable antibody such that when the activatable antibody is in the uncleaved state, binding of the activatable antibody to CD147 is reduced to occur with a dissociation constant that is at least 10-fold greater than the dissociation constant of an unmodified AB binding to CD147, whereas in the cleaved state (i.e., when the activatable antibody is in the cleaved state), the AB binds CD147.

[0250] In some embodiments, the CM is positioned in the activatable antibody such that when the activatable antibody is in the uncleaved state, binding of the activatable antibody to CD147 is reduced to occur with a dissociation constant that is at least 20-fold greater than the dissociation constant of an unmodified AB binding to CD147, whereas in the cleaved state (i.e., when the activatable antibody is in the cleaved state), the AB binds CD147.

[0251] In some embodiments, the CM is positioned in the activatable antibody such that when the activatable antibody is in the uncleaved state, binding of the activatable antibody to CD147 is reduced to occur with a dissociation constant that is at least 40-fold greater than the dissociation constant of an unmodified AB binding to CD147, whereas in the cleaved state, the AB binds CD147.

[0252] In some embodiments, the CM is positioned in the activatable antibody such that when the activatable antibody is in the uncleaved state, binding of the activatable antibody to CD147 is reduced to occur with a dissociation constant that is at least 50-fold greater than the dissociation constant of an unmodified AB binding to CD147, whereas in the cleaved state, the AB binds CD147.

[0253] In some embodiments, the CM is positioned in the activatable antibody such that when the activatable antibody is in the uncleaved state, binding of the activatable antibody to CD147 is reduced to occur with a dissociation constant that is at least 100-fold greater than the dissociation constant of an unmodified AB binding to CD147, whereas in the cleaved state, the AB binds CD147.

[0254] In some embodiments, the CM is positioned in the activatable antibody such that when the activatable antibody is in the uncleaved state, binding of the activatable antibody to CD147 is reduced to occur with a dissociation constant that is at least 200-fold greater than the dissociation constant of an unmodified AB binding to CD147, whereas in the cleaved state, the AB binds CD147.

[0255] In some embodiments, the CM is a polypeptide of up to 15 amino acids in length.

[0256] In some embodiments, the CM is a polypeptide that includes a first cleavable moiety (CM1) that is a substrate for at least one matrix metalloprotease (MMP) and a second cleavable moiety (CM2) that is a substrate for at least one serine protease (SP). In some embodiments, each of the CM1 substrate sequence and the CM2 substrate sequence of the CM1-CM2 substrate is independently a polypeptide of up to 15 amino acids in length.

[0257] In some embodiments, the CM is a substrate for at least one protease that is or is believed to be up-regulated or otherwise unregulated in cancer.

[0258] In some embodiments, the CM is a substrate for at least one protease selected from the group consisting of a matrix metalloprotease (MMP), thrombin, a neutrophil elastase, a cysteine protease, legumain, and a serine protease, such as matriptase (MT-SP1), and urokinase (uPA). Without being bound by theory, it is believed that these proteases are up-regulated or otherwise unregulated in at least one of cancer.

[0259] Exemplary substrates include but are not limited to substrates cleavable by one or more of the following enzymes or proteases listed in Table 3.

[0260] In some embodiments, the CM is selected for use with a specific protease, for example a protease that is known to be co-localized with the target of the activatable antibody.

[0261] In some embodiments, the CM is a substrate for at least one MMP. Examples of MMPs include the MMPs listed in the Table 3. In some embodiments, the CM is a substrate for a protease selected from the group consisting of MMP 9, MMP14, MMP1, MMP3, MMP13, MMP17, MMP11, and MMP19. In some embodiments the CM is a substrate for MMP9. In some embodiments, the CM is a substrate for MMP14.

[0262] In some embodiments, the CM is a substrate that includes the sequence TGRGPSWV (SEQ ID NO: 356); SARGPSRW (SEQ ID NO: 357); TARGPSFK (SEQ ID NO: 358); LSGRSDNH (SEQ ID NO: 359); GGWHTGRN (SEQ ID NO: 360); HTGRSGAL (SEQ ID NO: 361); PLTGRSGG (SEQ ID NO: 362); AARGPAIH (SEQ ID NO: 363); RGPAFNPM (SEQ ID NO: 364); SSRGPAYL (SEQ ID NO: 365); RGPATPIM (SEQ ID NO: 366); RGPA (SEQ ID NO: 367); GGQPSGMWGW (SEQ ID NO: 368); FPRPLGITGL (SEQ ID NO: 369); VHMPLGFLGP (SEQ ID NO: 370); SPLTGRSG (SEQ ID NO: 371); SAGFSLPA (SEQ ID NO: 372); LAPLGLQRR (SEQ ID NO: 373); SGGPLGVR (SEQ ID NO: 374); PLGL (SEQ ID NO: 375); LSGRSGNH (SEQ ID NO: 789), SGRSANPRG (SEQ ID NO: 790); LSGRSDDH (SEQ ID NO: 791); LSGRSDIH (SEQ ID NO: 792); LSGRSDQH (SEQ ID NO: 793); LSGRSDTH (SEQ ID NO: 794); LSGRSDYH (SEQ ID NO: 795); LSGRSDNP (SEQ ID NO: 796); LSGRSANP (SEQ ID NO: 797); LSGRSANI (SEQ ID NO: 798); LSGRSDNI (SEQ ID NO: 799); MIAPVAYR (SEQ ID NO: 800); RPSPMWAY (SEQ ID NO: 801); WATPRPMR (SEQ ID NO: 802); FRLLDWQW (SEQ ID NO: 803); ISSGL (SEQ ID NO: 804); ISSGLLS (SEQ ID NO: 805); and/or ISSGLL (SEQ ID NO: 806).

[0263] In some embodiments, the CM comprises the amino acid sequence LSGRSDNH (SEQ ID NO: 359). In some embodiments, the CM comprises the amino acid sequence TGRGPSWV (SEQ ID NO: 356). In some embodiments, the CM comprises the amino acid sequence PLTGRSGG (SEQ ID NO: 362). In some embodiments, the CM comprises the amino acid sequence GGQPSGMWGW (SEQ ID NO: 368). In some embodiments, the CM comprises the amino acid sequence FPRPLGITGL (SEQ ID NO: 369). In some embodiments, the CM comprises the amino acid sequence VHMPLGFLGP (SEQ ID NO: 370). In some embodiments, the CM comprises the amino acid sequence PLGL (SEQ ID NO: 375). In some embodiments, the CM comprises the amino acid sequence SARGPSRW (SEQ ID NO: 357). In some embodiments, the CM comprises the amino acid sequence TARGPSFK (SEQ ID NO: 358). In some embodiments, the CM comprises the amino acid sequence GGWHTGRN (SEQ ID NO: 360). In some embodiments, the CM comprises the amino acid sequence HTGRSGAL (SEQ ID NO: 361). In some embodiments, the CM comprises the amino acid sequence AARGPAIH (SEQ ID NO: 363). In some embodiments, the CM comprises the amino acid sequence RGPAFNPM (SEQ ID NO: 364). In some embodiments, the CM comprises the amino acid sequence SSRGPAYL (SEQ ID NO: 365). In some embodiments, the CM comprises the amino acid sequence RGPATPIM (SEQ ID NO: 366). In some embodiments, the CM comprises the amino acid sequence RGPA (SEQ ID NO: 367). In some embodiments, the CM comprises the amino acid sequence LSGRSGNH (SEQ ID NO: 789). In some embodiments, the CM comprises the amino acid sequence SGRSANPRG (SEQ ID NO: 790). In some embodiments, the CM comprises the amino acid sequence LSGRSDDH (SEQ ID NO: 791). In some embodiments, the CM comprises the amino acid sequence LSGRSDIH (SEQ ID NO: 792). In some embodiments, the CM comprises the amino acid sequence LSGRSDQH (SEQ ID NO: 793). In some embodiments, the CM comprises the amino acid sequence LSGRSDTH (SEQ ID NO: 794). In some embodiments, the CM comprises the amino acid sequence LSGRSDYH (SEQ ID NO: 795). In some embodiments, the CM comprises the amino acid sequence LSGRSDNP (SEQ ID NO: 796). In some embodiments, the CM comprises the amino acid sequence LSGRSANP (SEQ ID NO: 797). In some embodiments, the CM comprises the amino acid sequence LSGRSANI (SEQ ID NO: 798). In some embodiments, the CM comprises the amino acid sequence LSGRSDNI (SEQ ID NO: 799). In some embodiments, the CM comprises the amino acid sequence MIAPVAYR (SEQ ID NO: 800). In some embodiments, the CM comprises the amino acid sequence RPSPMWAY (SEQ ID NO: 801). In some embodiments, the CM comprises the amino acid sequence WATPRPMR (SEQ ID NO: 802). In some embodiments, the CM comprises the amino acid sequence FRLLDWQW (SEQ ID NO: 803). In some embodiments, the CM comprises the amino acid sequence ISSGL (SEQ ID NO: 804). In some embodiments, the CM comprises the amino acid sequence ISSGLLS (SEQ ID NO: 805). In some embodiments, the CM comprises the amino acid sequence and/or ISSGLL (SEQ ID NO: 806).

[0264] In some embodiments, the CM is a substrate for an MMP and includes the sequence ISSGLSS (SEQ ID NO: 376); QNQALRMA (SEQ ID NO: 377); AQNLLGMV (SEQ ID NO: 378); STFPFGMF (SEQ ID NO: 379); PVGYTSSL (SEQ ID NO: 380); DWLYWPGI (SEQ ID NO: 381), ISSGLLSS (SEQ ID NO: 382), LKAAPRWA (SEQ ID NO: 383); GPSHLVLT (SEQ ID NO: 384); LPGGLSPW (SEQ ID NO: 385); MGLFSEAG (SEQ ID NO: 386); SPLPLRVP (SEQ ID NO: 387); RMHLRSLG (SEQ ID NO: 388); LAAPLGLL (SEQ ID NO: 389); AVGLLAPP (SEQ ID NO: 390); LLAPSHRA (SEQ ID NO: 391); and/or PAGLWLDP (SEQ ID NO: 392).

[0265] In some embodiments, the CM comprises the amino acid sequence ISSGLSS (SEQ ID NO: 376). In some embodiments, the CM comprises the amino acid sequence QNQALRMA (SEQ ID NO: 377). In some embodiments, the CM comprises the amino acid sequence AQNLLGMV (SEQ ID NO: 378). In some embodiments, the CM comprises the amino acid sequence STFPFGMF (SEQ ID NO: 379). In some embodiments, the CM comprises the amino acid sequence PVGYTSSL (SEQ ID NO: 380). In some embodiments, the CM comprises the amino acid sequence DWLYWPGI (SEQ ID NO: 381). In some embodiments, the CM comprises the amino acid sequence ISSGLLSS (SEQ ID NO: 382). In some embodiments, the CM comprises the amino acid sequence LKAAPRWA (SEQ ID NO: 383). In some embodiments, the CM comprises the amino acid sequence GPSHLVLT (SEQ ID NO: 384). In some embodiments, the CM comprises the amino acid sequence LPGGLSPW (SEQ ID NO: 385). In some embodiments, the CM comprises the amino acid sequence MGLFSEAG (SEQ ID NO: 386). In some embodiments, the CM comprises the amino acid sequence SPLPLRVP (SEQ ID NO: 387). In some embodiments, the CM comprises the amino acid sequence RMHLRSLG (SEQ ID NO: 388). In some embodiments, the CM comprises the amino acid sequence LAAPLGLL (SEQ ID NO: 389). In some embodiments, the CM comprises the amino acid sequence AVGLLAPP (SEQ ID NO: 390). In some embodiments, the CM comprises the amino acid sequence LLAPSHRA (SEQ ID NO: 391). In some embodiments, the CM comprises the amino acid sequence PAGLWLDP (SEQ ID NO: 392).

[0266] In some embodiments, the CM is a substrate for thrombin. In some embodiments, the CM is a substrate for thrombin and includes the sequence GPRSFGL (SEQ ID NO: 393) or GPRSFG (SEQ ID NO: 394). In some embodiments, the CM comprises the amino acid sequence GPRSFGL (SEQ ID NO: 393). In some embodiments, the CM comprises the amino acid sequence GPRSFG (SEQ ID NO: 394).

[0267] In some embodiments, the CM comprises an amino acid sequence selected from the group consisting of NTLSGRSENHSG (SEQ ID NO: 395); NTLSGRSGNHGS (SEQ ID NO: 396); TSTSGRSANPRG (SEQ ID NO: 397); TSGRSANP (SEQ ID NO: 398); VAGRSMRP (SEQ ID NO: 399); VVPEGRRS (SEQ ID NO: 400); ILPRSPAF (SEQ ID NO: 401); MVLGRSLL (SEQ ID NO: 402); QGRAITFI (SEQ ID NO: 403); SPRSIMLA (SEQ ID NO: 404); and SMLRSMPL (SEQ ID NO: 405).

[0268] In some embodiments, the CM comprises the amino acid sequence NTLSGRSENHSG (SEQ ID NO: 395). In some embodiments, the CM comprises the amino acid sequence NTLSGRSGNHGS (SEQ ID NO: 396). In some embodiments, the CM comprises the amino acid sequence TSTSGRSANPRG (SEQ ID NO: 397). In some embodiments, the CM comprises the amino acid sequence TSGRSANP (SEQ ID NO: 398). In some embodiments, the CM comprises the amino acid sequence VAGRSMRP (SEQ ID NO: 399). In some embodiments, the CM comprises the amino acid sequence VVPEGRRS (SEQ ID NO: 400). In some embodiments, the CM comprises the amino acid sequence ILPRSPAF (SEQ ID NO: 401). In some embodiments, the CM comprises the amino acid sequence MVLGRSLL (SEQ ID NO: 402). In some embodiments, the CM comprises the amino acid sequence QGRAITFI (SEQ ID NO: 403). In some embodiments, the CM comprises the amino acid sequence SPRSIMLA (SEQ ID NO: 404). In some embodiments, the CM comprises the amino acid sequence SMLRSMPL (SEQ ID NO: 405).

[0269] In some embodiments, the CM is a substrate for a neutrophil elastase. In some embodiments, the CM is a substrate for a serine protease. In some embodiments, the CM is a substrate for uPA. In some embodiments, the CM is a substrate for legumain. In some embodiments, the CM is a substrate for matriptase. In some embodiments, the CM is a substrate for a cysteine protease. In some embodiments, the CM is a substrate for a cysteine protease, such as a cathepsin.

[0270] In some embodiments, the CM is a CM1-CM2 substrate and includes the sequence ISSGLLSGRSDNH (SEQ ID NO: 406); ISSGLLSSGGSGGSLSGRSDNH (SEQ ID NO: 407); AVGLLAPPGGTSTSGRSANPRG (SEQ ID NO: 408); TSTSGRSANPRGGGAVGLLAPP (SEQ ID NO: 409); VHMPLGFLGPGGTSTSGRSANPRG (SEQ ID NO: 410); TSTSGRSANPRGGGVHMPLGFLGP (SEQ ID NO: 411); AVGLLAPPGGLSGRSDNH (SEQ ID NO: 412); LSGRSDNHGGAVGLLAPP (SEQ ID NO: 413); VHMPLGFLGPGGLSGRSDNH (SEQ ID NO: 414); LSGRSDNHGGVHMPLGFLGP (SEQ ID NO: 415); LSGRSDNHGGSGGSISSGLLSS (SEQ ID NO: 416); LSGRSGNHGGSGGSISSGLLSS (SEQ ID NO: 417); ISSGLLSSGGSGGSLSGRSGNH (SEQ ID NO: 418); LSGRSDNHGGSGGSQNQALRMA (SEQ ID NO: 419); QNQALRMAGGSGGSLSGRSDNH (SEQ ID NO: 420); LSGRSGNHGGSGGSQNQALRMA (SEQ ID NO: 421); QNQALRMAGGSGGSLSGRSGNH (SEQ ID NO: 422); ISSGLLSGRSGNH (SEQ ID NO: 423); ISSGLLSGRSANPRG (SEQ ID NO: 680); AVGLLAPPTSGRSANPRG (SEQ ID NO: 681); AVGLLAPPSGRSANPRG (SEQ ID NO: 682); ISSGLLSGRSDDH (SEQ ID NO: 683); ISSGLLSGRSDIH (SEQ ID NO: 684); ISSGLLSGRSDQH (SEQ ID NO: 685); ISSGLLSGRSDTH (SEQ ID NO: 686); ISSGLLSGRSDYH (SEQ ID NO: 687); ISSGLLSGRSDNP (SEQ ID NO: 688); ISSGLLSGRSANP (SEQ ID NO: 689); ISSGLLSGRSANI (SEQ ID NO: 690); AVGLLAPPGGLSGRSDDH (SEQ ID NO: 691); AVGLLAPPGGLSGRSDIH (SEQ ID NO: 692); AVGLLAPPGGLSGRSDQH (SEQ ID NO: 693); AVGLLAPPGGLSGRSDTH (SEQ ID NO: 694); AVGLLAPPGGLSGRSDYH (SEQ ID NO: 695); AVGLLAPPGGLSGRSDNP (SEQ ID NO: 696); AVGLLAPPGGLSGRSANP (SEQ ID NO: 697); AVGLLAPPGGLSGRSANI (SEQ ID NO: 698), ISSGLLSGRSDNI (SEQ ID NO: 713); AVGLLAPPGGLSGRSDNI (SEQ ID NO: 714); GLSGRSDNHGGAVGLLAPP (SEQ ID NO: 807); and/or GLSGRSDNHGGVHMPLGFLGP (SEQ ID NO: 808).

[0271] In some embodiments, the CM1-CM2 substrate includes the sequence ISSGLLSGRSDNH (SEQ ID NO: 406), which is also referred to herein as substrate 2001. In some embodiments, the CM1-CM2 substrate includes the sequence ISSGLLSSGGSGGSLSGRSDNH (SEQ ID NO: 407), which is also referred to herein as substrate 1001/LP′/0001, where LP′ as used in this CM1-CM2 substrate is the amino acid sequence GGSGGS (SEQ ID NO: 1037). In some embodiments, the CM1-CM2 substrate includes the sequence AVGLLAPPGGTSTSGRSANPRG (SEQ ID NO: 408), which is also referred to herein as substrate 2015 and/or substrate 1004/LP′/0003, where LP′ as used in this CM1-CM2 substrate is the amino acid sequence GG. In some embodiments, the CM1-CM2 substrate includes the sequence TSTSGRSANPRGGGAVGLLAPP (SEQ ID NO: 409), which is also referred to herein as substrate 0003/LP′/1004, where LP′ as used in this CM1-CM2 substrate is the amino acid sequence GG. In some embodiments, the CM1-CM2 substrate includes the sequence VHMPLGFLGPGGTSTSGRSANPRG (SEQ ID NO: 410), which is also referred to herein as substrate 1003/LP′/0003, where LP′ as used in this CM1-CM2 substrate is the amino acid sequence GG. In some embodiments, the CM1-CM2 substrate includes the sequence TSTSGRSANPRGGGVHMPLGFLGP (SEQ ID NO: 411), which is also referred to herein as substrate 0003/LP′/1003, where LP′ as used in this CM1-CM2 substrate is the amino acid sequence GG. In some embodiments, the CM1-CM2 substrate includes the sequence AVGLLAPPGGLSGRSDNH (SEQ ID NO: 412), which is also referred to herein as substrate 3001 and/or substrate 1004/LP′/0001, where LP′ as used in this CM1-CM2 substrate is the amino acid sequence GG. In some embodiments, the CM1-CM2 substrate includes the sequence LSGRSDNHGGAVGLLAPP (SEQ ID NO: 413), which is also referred to herein as substrate 0001/LP′/1004, where LP′ as used in this CM1-CM2 substrate is the amino acid sequence GG. In some embodiments, the CM1-CM2 substrate includes the sequence VHMPLGFLGPGGLSGRSDNH (SEQ ID NO: 414), which is also referred to herein as substrate 1003/LP′/0001, wherein LP′ as used in this CM1-CM2 substrate is the amino acid sequence GG. In some embodiments, the CM1-CM2 substrate includes the sequence LSGRSDNHGGVHMPLGFLGP (SEQ ID NO: 415), which is also referred to herein as substrate 0001/LP′/1003, where LP′ as used in this CM1-CM2 substrate is the amino acid sequence GG. In some embodiments, the CM1-CM2 substrate includes the sequence LSGRSDNHGGSGGSISSGLLSS (SEQ ID NO: 416), which is also referred to herein as substrate 0001/LP′/1001, where LP′ as used in this CM1-CM2 substrate is the amino acid sequence GGSGGS (SEQ ID NO: 1037). In some embodiments, the CM1-CM2 substrate includes the sequence LSGRSGNHGGSGGSISSGLLSS (SEQ ID NO: 417), which is also referred to herein as substrate 0002/LP′/1001, where LP′ as used in this CM1-CM2 substrate is the amino acid sequence GGSGGS (SEQ ID NO: 1037). In some embodiments, the CM1-CM2 substrate includes the sequence ISSGLLSSGGSGGSLSGRSGNH (SEQ ID NO: 418), which is also referred to herein as substrate 1001/LP′/0002, where LP′ as used in this CM1-CM2 substrate is the amino acid sequence GGSGGS (SEQ ID NO: 1037). In some embodiments, the CM1-CM2 substrate includes the sequence LSGRSDNHGGSGGSQNQALRMA (SEQ ID NO: 419), which is also referred to herein as substrate 0001/LP′/1002, where LP′ as used in this CM1-CM2 substrate is the amino acid sequence GGSGGS (SEQ ID NO: 1037). In some embodiments, the CM1-CM2 substrate includes the sequence QNQALRMAGGSGGSLSGRSDNH (SEQ ID NO: 420), which is also referred to herein as substrate 1002/LP′/0001, where LP′ as used in this CM1-CM2 substrate is the amino acid sequence GGSGGS (SEQ ID NO: 1037). In some embodiments, the CM1-CM2 substrate includes the sequence LSGRSGNHGGSGGSQNQALRMA (SEQ ID NO: 421), which is also referred to herein as substrate 0002/LP′/1002, where LP′ as used in this CM1-CM2 substrate is the amino acid sequence GGSGGS (SEQ ID NO: 1037). In some embodiments, the CM1-CM2 substrate includes the sequence QNQALRMAGGSGGSLSGRSGNH (SEQ ID NO: 422), which is also referred to herein as substrate 1002/LP′/0002, where LP′ as used in this CM1-CM2 substrate is the amino acid sequence GGSGGS (SEQ ID NO: 1037). In some embodiments, the CM1-CM2 substrate includes the sequence ISSGLLSGRSGNH (SEQ ID NO: 423), which is also referred to herein as substrate 2002. In some embodiments, the CM1-CM2 substrate includes the sequence ISSGLLSGRSANPRG (SEQ ID NO: 680), which is also referred to herein as substrate 2003. In some embodiments, the CM1-CM2 substrate includes the sequence AVGLLAPPTSGRSANPRG (SEQ ID NO: 681), which is also referred to herein as substrate 2004. In some embodiments, the CM1-CM2 substrate includes the sequence AVGLLAPPSGRSANPRG (SEQ ID NO: 682), which is also referred to herein as substrate 2005. In some embodiments, the CM1-CM2 substrate includes the sequence ISSGLLSGRSDDH (SEQ ID NO: 683), which is also referred to herein as substrate 2006. In some embodiments, the CM1-CM2 substrate includes the sequence ISSGLLSGRSDIH (SEQ ID NO: 684), which is also referred to herein as substrate 2007. In some embodiments, the CM1-CM2 substrate includes the sequence ISSGLLSGRSDQH (SEQ ID NO: 685), which is also referred to herein as substrate 2008. In some embodiments, the CM1-CM2 substrate includes the sequence ISSGLLSGRSDTH (SEQ ID NO: 686), which is also referred to herein as substrate 2009. In some embodiments, the CM1-CM2 substrate includes the sequence ISSGLLSGRSDYH (SEQ ID NO: 687), which is also referred to herein as substrate 2010. In some embodiments, the CM1-CM2 substrate includes the sequence ISSGLLSGRSDNP (SEQ ID NO: 688), which is also referred to herein as substrate 2011. In some embodiments, the CM1-CM2 substrate includes the sequence ISSGLLSGRSANP (SEQ ID NO: 689), which is also referred to herein as substrate 2012. In some embodiments, the CM1-CM2 substrate includes the sequence ISSGLLSGRSANI (SEQ ID NO: 690), which is also referred to herein as substrate 2013. In some embodiments, the CM1-CM2 substrate includes the sequence AVGLLAPPGGLSGRSDDH (SEQ ID NO: 691), which is also referred to herein as substrate 3006. In some embodiments, the CM1-CM2 substrate includes the sequence AVGLLAPPGGLSGRSDIH (SEQ ID NO: 692), which is also referred to herein as substrate 3007. In some embodiments, the CM1-CM2 substrate includes the sequence AVGLLAPPGGLSGRSDQH (SEQ ID NO: 693), which is also referred to herein as substrate 3008. In some embodiments, the CM1-CM2 substrate includes the sequence AVGLLAPPGGLSGRSDTH (SEQ ID NO: 694), which is also referred to herein as substrate 3009. In some embodiments, the CM1-CM2 substrate includes the sequence AVGLLAPPGGLSGRSDYH (SEQ ID NO: 695), which is also referred to herein as substrate 3010. In some embodiments, the CM1-CM2 substrate includes the sequence AVGLLAPPGGLSGRSDNP (SEQ ID NO: 696), which is also referred to herein as substrate 3011. In some embodiments, the CM1-CM2 substrate includes the sequence AVGLLAPPGGLSGRSANP (SEQ ID NO: 697), which is also referred to herein as substrate 3012. In some embodiments, the CM1-CM2 substrate includes the sequence AVGLLAPPGGLSGRSANI (SEQ ID NO: 698), which is also referred to herein as substrate 3013. In some embodiments, the CM1-CM2 substrate includes the sequence ISSGLLSGRSDNI (SEQ ID NO: 713), which is also referred to herein as substrate 2014. In some embodiments, the CM1-CM2 substrate includes the sequence AVGLLAPPGGLSGRSDNI (SEQ ID NO: 714), which is also referred to herein as substrate 3014. In some embodiments, the CM1-CM2 substrate includes the sequence GLSGRSDNHGGAVGLLAPP (SEQ ID NO: 807), which is also referred to herein as substrate 0001/LP′/1004, where LP′ as used in this CM1-CM2 substrate is the amino acid sequence GG. In some embodiments, the CM1-CM2 substrate includes the sequence GLSGRSDNHGGVHMPLGFLGP (SEQ ID NO: 808), which is also referred to herein as substrate 0001/LP′/1003, where LP′ as used in this CM1-CM2 substrate is the amino acid sequence GG.

[0272] In some embodiments, the CM is a substrate for at least two proteases. In some embodiments, each protease is selected from the group consisting of those shown in Table 3. In some embodiments, the CM is a substrate for at least two proteases, wherein one of the proteases is selected from the group consisting of a MMP, thrombin, a neutrophil elastase, a cysteine protease, uPA, legumain and matriptase and the other protease is selected from the group consisting of those shown in Table 3. In some embodiments, the CM is a substrate for at least two proteases selected from the group consisting of a MMP, thrombin, a neutrophil elastase, a cysteine protease, uPA, legumain and matriptase.

[0273] In some embodiments, the activatable antibody includes at least a first CM and a second CM. In some embodiments, the first CM and the second CM are each polypeptides of no more than 15 amino acids long. In some embodiments, the first CM and the second CM in the activatable antibody in the uncleaved state have the structural arrangement from N-terminus to C-terminus as follows: MM-CM1-CM2-AB or AB-CM2-CM1-MM. In some embodiments, at least one of the first CM and the second CM is a polypeptide that functions as a substrate for a protease selected from the group consisting of a MMP, thrombin, a neutrophil elastase, a cysteine protease, uPA, legumain, and matriptase. In some embodiments, the first CM is cleaved by a first cleaving agent selected from the group consisting of a MMP, thrombin, a neutrophil elastase, a cysteine protease, uPA, legumain, and matriptase in a target tissue and the second CM is cleaved by a second cleaving agent in a target tissue. In some embodiments, the other protease is selected from the group consisting of those shown in Table 3. In some embodiments, the first cleaving agent and the second cleaving agent are the same protease selected from the group consisting of a MMP, thrombin, a neutrophil elastase, a cysteine protease, uPA, legumain, and matriptase, and the first CM and the second CM are different substrates for the enzyme. In some embodiments, the first cleaving agent and the second cleaving agent are the same protease selected from the group consisting of those shown in Table 3. In some embodiments, the first cleaving agent and the second cleaving agent are different proteases. In some embodiments, the first cleaving agent and the second cleaving agent are co-localized in the target tissue. In some embodiments, the first CM and the second CM are cleaved by at least one cleaving agent in the target tissue.

[0274] In some embodiments, the activatable antibody is exposed to and cleaved by a protease such that, in the activated or cleaved state, the activated antibody includes a light chain amino acid sequence that includes at least a portion of LP2 and/or CM sequence after the protease has cleaved the CM.

[0275] Suitable activatable CD147 antibodies of the disclosure also include an antibody or antigen binding fragment thereof that binds to the same epitope on human CD147 and/or cynomolgus monkey CD147 as a CD147 antibody comprising a heavy chain variable region amino acid sequence selected from the group consisting of SEQ ID NOs: 1-4, and a light chain variable region amino acid sequence selected from the group consisting of SEQ ID NOs: 5-9.

[0276] Suitable activatable CD147 antibodies of the disclosure also include an antibody or antigen binding fragment thereof that binds to the same epitope on human CD147 and/or cynomolgus monkey CD147 as a CD147 antibody comprising a VH CDR1 sequence comprising the amino acid sequence GFTFSNYWMN (SEQ ID NO: 10) or GFTFSNYWMD (SEQ ID NO: 11); a VH CDR2 sequence comprising the amino acid sequence EIRLKSYNYATH (SEQ ID NO: 12); a VH CDR3 sequence comprising the amino acid sequence AGTDY (SEQ ID NO: 13); a VL CDR1 sequence comprising the amino acid sequence KASQSVRTDVA (SEQ ID NO: 14) or RASQSVRTDVG (SEQ ID NO: 15); a VL CDR2 sequence comprising the amino acid sequence YSSNRYT (SEQ ID NO: 16); and a VL CDR3 sequence comprising the amino acid sequence QQDYSSPFT (SEQ ID NO: 17) or QQDYSSPYT (SEQ ID NO: 18).

[0277] Suitable activatable CD147 antibodies of the disclosure also include an antibody or antigen-binding fragment thereof that binds to the same epitope on human CD147 and/or cynomolgus monkey CD147 as a CD147 antibody comprising a heavy chain variable region amino acid sequence selected from the group consisting of the heavy chain variable region sequences shown in Table 1 and a light chain variable region amino acid sequence selected from the group consisting of the light chain variable region sequences shown in Table 1.

[0278] Suitable activatable CD147 antibodies of the disclosure also include an antibody or antigen-binding fragment thereof that binds to the same epitope on human CD147 and/or cynomolgus monkey CD147 as a CD147 antibody comprising a combination of a VH CDR1 sequence, a VH CDR2 sequence, a VH CDR3 sequence, a VL CDR1 sequence, a VL CDR2 sequence, and a VL CDR3 sequence, wherein the combination is a combination of the six CDR sequences (VH CDR1, VH CDR2, VH CDR3, VL CDR1, VL CDR2, and VL CDR3) shown in a single row in Table 2.

[0279] Suitable activatable CD147 antibodies of the disclosure also include an antibody or antigen binding fragment thereof that cross-competes for binding to (inhibits the binding of) human CD147 and/or cynomolgus monkey CD147 to a CD147 antibody comprising a heavy chain variable region amino acid sequence selected from the group consisting of SEQ ID NOs: 1-4, and a light chain variable region amino acid sequence selected from the group consisting of SEQ ID NOs: 5-9.

[0280] Suitable activatable CD147 antibodies of the disclosure also include an antibody or antigen binding fragment thereof that cross-competes for binding to (inhibits the binding of) human CD147 and/or cynomolgus monkey CD147 to a CD147 antibody comprising a VH CDR1 sequence comprising the amino acid sequence GFTFSNYWMN (SEQ ID NO: 10) or GFTFSNYWMD (SEQ ID NO: 11); a VH CDR2 sequence comprising the amino acid sequence EIRLKSYNYATH (SEQ ID NO: 12); a VH CDR3 sequence comprising the amino acid sequence AGTDY (SEQ ID NO: 13); a VL CDR1 sequence comprising the amino acid sequence KASQSVRTDVA (SEQ ID NO: 14) or RASQSVRTDVG (SEQ ID NO: 15); a VL CDR2 sequence comprising the amino acid sequence YSSNRYT (SEQ ID NO: 16); and a VL CDR3 sequence comprising the amino acid sequence QQDYSSPFT (SEQ ID NO: 17) or QQDYSSPYT (SEQ ID NO: 18).

[0281] Suitable activatable CD147 antibodies of the disclosure also include an antibody or antigen-binding fragment thereof that cross-competes for binding to (inhibits the binding of) human CD147 and/or cynomolgus monkey CD147 as a CD147 antibody comprising a heavy chain variable region amino acid sequence selected from the group consisting of the heavy chain variable region sequences shown in Table 1 and a light chain variable region amino acid sequence selected from the group consisting of the light chain variable region sequences shown in Table 1.

[0282] Suitable activatable CD147 antibodies of the disclosure also include an antibody or antigen-binding fragment thereof that cross-competes for binding to (inhibits the binding of) human CD147 and/or cynomolgus monkey CD147 as a CD147 antibody comprising a combination of a VH CDR1 sequence, a VH CDR2 sequence, a VH CDR3 sequence, a VL CDR1 sequence, a VL CDR2 sequence, and a VL CDR3 sequence, wherein the combination is a combination of the six CDR sequences (VH CDR1, VH CDR2, VH CDR3, VL CDR1, VL CDR2, and VL CDR3) shown in a single row in Table 2.

[0283] In some embodiments, the activatable CD147 antibody is an activatable antibody that, in an activated state, binds CD147 comprising: an antibody or an antigen binding fragment thereof (AB) that specifically binds to mammalian CD147, wherein the AB specifically binds human CD147 and cynomolgus monkey CD147; a masking moiety (MM) that inhibits the binding of the AB to CD147 when the activatable antibody is in an uncleaved state; and a cleavable moiety (CM) coupled to the AB, wherein the CM is a polypeptide that functions as a substrate for a protease.

[0284] In some embodiments, the MM has a dissociation constant for binding to the AB that is greater than the dissociation constant of the AB to CD147. In some embodiments, the MM does not interfere or compete with the AB for binding to CD147 when the activatable antibody is in a cleaved state. In some embodiments, the MM is a polypeptide of no more than 40 amino acids in length. In some embodiments, the MM polypeptide sequence is different from that of human CD147. In some embodiments, the MM polypeptide sequence is no more than 50% identical to any natural binding partner of the AB. In some embodiments, the MM comprises an amino acid sequence selected from the group consisting of SEQ ID NOs: 30-100. In some embodiments, the MM comprises an amino acid sequence selected from the group consisting of SEQ ID NOs: 30, 31, 33, 44, 46, 75-80, 82, 83, 86-89, and 90-100.

[0285] In some embodiments, the CM is a substrate for a protease that is active in diseased tissue. In some embodiments, the CM comprises an amino acid sequence selected from the group consisting of SEQ ID NOs: 356-423, 680-698, 713, 714, and 789-808. In some embodiments, the CM comprises an amino acid sequence selected from the group consisting of SEQ ID NOs: 359, 370, 377, 382, 390, 397, 406-423, 680-698, 713, 714, and 807-808.

[0286] In some embodiments, the activatable antibody comprises an antigen binding fragment thereof is selected from the group consisting of a Fab fragment, a F(ab′)2 fragment, a scFv, a scAb, a dAb, a single domain heavy chain antibody, and a single domain light chain antibody. In some embodiments, the AB of the activatable antibody specifically binds human CD147. In some embodiments, the AB comprises the VH CDR1 sequence GFTFSNYWMN (SEQ ID NO: 10) or GFTFSNYWMD (SEQ ID NO: 11); the VH CDR2 sequence EIRLKSYNYATH (SEQ ID NO: 12); the VH CDR3 sequence AGTDY (SEQ ID NO: 13); the VL CDR1 sequence KASQSVRTDVA (SEQ ID NO: 14) or RASQSVRTDVG (SEQ ID NO: 15); the VL CDR2 sequence YSSNRYT (SEQ ID NO: 16); and the VL CDR3 sequence QQDYSSPFT (SEQ ID NO: 17) or QQDYSSPYT (SEQ ID NO: 18). In some embodiments, the AB comprises a heavy chain variable region comprising an amino acid sequence selected from the group consisting of SEQ ID NOs: 1-4, and a light chain variable region comprising an amino acid sequence selected from the group consisting of SEQ ID NOs: 5-9.

[0287] In some embodiments, the AB is linked to the CM. In some embodiments, the AB is linked directly to the CM. In some embodiments, the AB is linked to the CM via a linking peptide. In some embodiments, the MM is linked to the CM such that the activatable antibody in an uncleaved state comprises the structural arrangement from N-terminus to C-terminus as follows: MM-CM-AB or AB-CM-MM. In some embodiments, the activatable antibody comprises a linking peptide between the MM and the CM. In some embodiments, the activatable antibody comprises a linking peptide between the CM and the AB. In some embodiments, the activatable antibody comprises a first linking peptide (LP1) and a second linking peptide (LP2), and wherein the activatable antibody in the uncleaved state has the structural arrangement from N-terminus to C-terminus as follows: MM-LP1-CM-LP2-AB or AB-LP2-CM-LP1-MM. In some embodiments, the two linking peptides need not be identical to each other. In some embodiments, each of LP1 and LP2 is a peptide of about 1 to 20 amino acids in length.

[0288] In some embodiments, the activatable antibody comprises the heavy chain sequence selected from the group consisting of SEQ ID NOs: 1-4 and 19-22 and a light chain comprising an amino acid sequence selected from the group consisting of SEQ ID NOs: 5-9, 23-27, 140-182, 185-227, 230-272, and 275-317.

[0289] In some embodiments, the activatable antibody comprises a combination of amino acid sequences, wherein the combination of amino acid sequences is selected from a single row in Table 4, wherein for a given combination, (a) the heavy chain of the AB comprises the amino acid sequences of the VH CDR sequences corresponding to the given combination in the single row listed in Table 4, (b) the light chain of the AB comprises the amino acid sequences of the VL CDR sequences corresponding to the given combination in the single row listed in Table 4, (c) the MM comprises the amino acid sequence of the mask sequence (MM) corresponding to the given combination in the single row listed in Table 4, and (d) the CM comprises the amino acid sequence of the substrate sequence (CM) corresponding to the given combination in the single row listed in Table 4.

[0290] In some embodiments, the activatable antibody comprises a combination of amino acid sequences, wherein for a given combination of amino acid sequences, (a) the heavy chain of the AB comprises the amino acid sequences of the VH sequence or VH CDR sequences selected from the group consisting of: the VH sequence or VH CDR sequences listed in the corresponding column of Table 5, (b) the light chain of the AB comprises the amino acid sequences of the VL sequence or VL CDR sequences selected from the group consisting of: the VL sequence or VL CDR sequences listed in the corresponding column of Table 5, (c) the MM comprises the amino acid sequence of the mask sequence (MM) selected from the group consisting of: the MM sequences listed in the corresponding column of Table 5, and (d) the CM comprises the amino acid sequence of the substrate sequence (CM) selected from the group consisting of: the CM sequences listed in the corresponding column of Table 5.

[0291] In some embodiments, the activatable CD147 antibody comprises an antibody or an antigen binding fragment thereof (AB) that specifically binds to mammalian CD147, a MM, and a CM, wherein the activatable antibody comprises: a heavy chain sequence of SEQ ID NOs: 19-22; and a light chain comprising an amino acid sequence selected from the group consisting of SEQ ID NOs: 5-9 and 23-27. In some embodiments, the MM comprises an amino acid sequence selected from the group consisting of SEQ ID NOs: 30-100, and the CM comprises an amino acid sequence selected from the group consisting of SEQ ID NOs: 359, 370, 377, 382, 390, 397, 406-423, 680-698, 713, 714, and 789-808. In some embodiments, the AB comprises the VH CDR1 sequence GFTFSNYWMN (SEQ ID NO: 10) or GFTFSNYWMD (SEQ ID NO: 11); the VH CDR2 sequence EIRLKSYNYATH (SEQ ID NO: 12); the VH CDR3 sequence AGTDY (SEQ ID NO: 13); the VL CDR1 sequence KASQSVRTDVA (SEQ ID NO: 14) or RASQSVRTDVG (SEQ ID NO: 15); the VL CDR2 sequence YSSNRYT (SEQ ID NO: 16), and the VL CDR3 sequence QQDYSSPFT (SEQ ID NO: 17) or QQDYSSPYT (SEQ ID NO: 18). In some embodiments, the AB comprises a heavy chain variable region comprising an amino acid sequence selected from the group consisting of SEQ ID NOs: 1-3, and a light chain variable region comprising an amino acid sequence selected from the group consisting of SEQ ID NOs: 5-9.

[0292] In some embodiments, the activatable CD147 antibody comprises an antibody or an antigen binding fragment thereof (AB) that specifically binds to mammalian CD147, a MM comprising an amino acid sequence selected from the group consisting of SEQ ID NOs: 30-100, and a CM comprising an amino acid sequence selected from the group consisting of SEQ ID NOs: 356-423, 680-698, 713, 714, and 789-808. In some embodiments, the MM comprises an amino acid sequence selected from the group consisting of SEQ ID NOs: 30-100, and the CM comprises an amino acid sequence selected from the group consisting of SEQ ID NOs: 359, 370, 377, 382, 390, 397, 406-423, 680-698, 713, 714, and 807-808. In some embodiments, the AB comprises the VH CDR1 sequence GFTFSNYWMN (SEQ ID NO: 10) or GFTFSNYWMD (SEQ ID NO: 11); the VH CDR2 sequence EIRLKSYNYATH (SEQ ID NO: 12); the VH CDR3 sequence AGTDY (SEQ ID NO: 13); the VL CDR1 sequence KASQSVRTDVA (SEQ ID NO: 14) or RASQSVRTDVG (SEQ ID NO: 15); the VL CDR2 sequence YSSNRYT (SEQ ID NO: 16); and the VL CDR3 sequence QQDYSSPFT (SEQ ID NO: 17) or QQDYSSPYT (SEQ ID NO: 18). In some embodiments, the AB comprises a heavy chain variable region comprising an amino acid sequence selected from the group consisting of SEQ ID NOs: 1-3, and a light chain variable region comprising an amino acid sequence selected from the group consisting of SEQ ID NOs: 5-9.

[0293] In some embodiments, the activatable CD147 antibody comprises an antibody or an antigen binding fragment thereof (AB) that specifically binds to mammalian CD147, wherein the AB specifically binds to the same epitope on human CD147 and/or cynomolgus monkey CD147 as an isolated antibody of the disclosure; a masking moiety (MM) that inhibits the binding of the AB to CD147 when the activatable antibody is in an uncleaved state; and a cleavable moiety (CM) coupled to the AB, wherein the CM is a polypeptide that functions as a substrate for a protease.

[0294] In some embodiments, the CD147 activatable antibody of the disclosure comprises an isolated antibody or an antigen binding fragment thereof (AB) that specifically binds to mammalian CD147, wherein the AB specifically binds human CD147 and cynomolgus monkey CD147. In some embodiments, the antibody or antigen binding fragment thereof comprises the VH CDR1 sequence GFTFSNYWMN (SEQ ID NO: 10) or GFTFSNYWMD (SEQ ID NO: 11); the VH CDR2 sequence EIRLKSYNYATH (SEQ ID NO: 12); the VH CDR3 sequence AGTDY (SEQ ID NO: 13); the VL CDR1 sequence KASQSVRTDVA (SEQ ID NO: 14) or RASQSVRTDVG (SEQ ID NO: 15); the VL CDR2 sequence YSSNRYT (SEQ ID NO: 16); and the VL CDR3 sequence QQDYSSPFT (SEQ ID NO: 17) or QQDYSSPYT (SEQ ID NO: 18). In some embodiments, the activatable antibody or antigen binding fragment thereof comprises a heavy chain variable region comprising an amino acid sequence selected from the group consisting of SEQ ID NOs: 1-4, and a light chain variable region comprising an amino acid sequence selected from the group consisting of SEQ ID NOs: 5-9.

[0295] In some embodiments, the activatable CD147 antibody comprises an antibody or an antigen binding fragment thereof (AB) that specifically binds to mammalian CD147, wherein the AB specifically cross-competes with (inhibits the binding of) an isolated antibody of the disclosure for binding to human CD147 and/or cynomolgus monkey CD147; a masking moiety (MM) that inhibits the binding of the AB to CD147 when the activatable antibody is in an uncleaved state; and a cleavable moiety (CM) coupled to the AB, wherein the CM is a polypeptide that functions as a substrate for a protease.

[0296] In some embodiments, the CD147 activatable antibody of the disclosure comprises an isolated antibody or an antigen binding fragment thereof (AB) that specifically binds to mammalian CD147, wherein the AB specifically binds human CD147 and cynomolgus monkey CD147. In some embodiments, the antibody or antigen binding fragment thereof comprises the VH CDR1 sequence GFTFSNYWMN (SEQ ID NO: 10) or GFTFSNYWMD (SEQ ID NO: 11); the VH CDR2 sequence EIRLKSYNYATH (SEQ ID NO: 12); the VH CDR3 sequence AGTDY (SEQ ID NO: 13); the VL CDR1 sequence KASQSVRTDVA (SEQ ID NO: 14) or RASQSVRTDVG (SEQ ID NO: 15); the VL CDR2 sequence YSSNRYT (SEQ ID NO: 16); and the VL CDR3 sequence QQDYSSPFT (SEQ ID NO: 17) or QQDYSSPYT (SEQ ID NO: 18). In some embodiments, the activatable antibody or antigen binding fragment thereof comprises a heavy chain variable region comprising an amino acid sequence selected from the group consisting of SEQ ID NOs: 1-4 and a light chain variable region comprising an amino acid sequence selected from the group consisting of SEQ ID NOs: 5-9.

[0297] In some embodiments, the activatable antibody also includes an agent conjugated to the AB. In some embodiments, the agent conjugated to the AB or the AB of an activatable antibody is a therapeutic agent. In some embodiments, the agent is an antineoplastic agent. In some embodiments, the agent is a toxin or fragment thereof. As used herein, a fragment of a toxin is a fragment that retains toxic activity. In some embodiments, the agent is conjugated to the AB via a cleavable linker. In some embodiments, the agent is conjugated to the AB via a linker that includes at least one CM1-CM2 substrate sequence. In some embodiments, the agent is conjugated to the AB via a noncleavable linker. In some embodiments, the agent is conjugated to the AB via a linker that is cleavable in an intracellular or lysosomal environment. In some embodiments, the agent is a microtubule inhibitor. In some embodiments, the agent is a nucleic acid damaging agent, such as a DNA alkylator, a DNA cleaving agent, a DNA cross-linker, a DNA intercalator, or other DNA damaging agent. In some embodiments, the agent is an agent selected from the group listed in Table 5. In some embodiments, the agent is a dolastatin. In some embodiments, the agent is an auristatin or derivative thereof. In some embodiments, the agent is auristatin E or a derivative thereof. In some embodiments, the agent is monomethyl auristatin E (MMAE). In some embodiments, the agent is monomethyl auristatin D (MMAD). In some embodiments, the agent is a maytansinoid or maytansinoid derivative. In some embodiments, the agent is DM1 or DM4. In some embodiments, the agent is a duocarmycin or derivative thereof. In some embodiments, the agent is a calicheamicin or derivative thereof. In some embodiments, the agent is a pyrrolobenzodiazepine. In some embodiments, the agent is a pyrrolobenzodiazepine dimer.

[0298] In some embodiments, the activatable antibody is conjugated to one or more equivalents of an agent. In some embodiments, the activatable antibody is conjugated to one equivalent of the agent. In some embodiments, the activatable antibody is conjugated to two, three, four, five, six, seven, eight, nine, ten, or greater than ten equivalents of the agent. In some embodiments, the activatable antibody is part of a mixture of activatable antibodies having a homogeneous number of equivalents of conjugated agents. In some embodiments, the activatable antibody is part of a mixture of activatable antibodies having a heterogeneous number of equivalents of conjugated agents. In some embodiments, the mixture of activatable antibodies is such that the average number of agents conjugated to each activatable antibody is between zero to one, between one to two, between two and three, between three and four, between four and five, between five and six, between six and seven, between seven and eight, between eight and nine, between nine and ten, and ten and greater. In some embodiments, the mixture of activatable antibodies is such that the average number of agents conjugated to each activatable antibody is one, two, three, four, five, six, seven, eight, nine, ten, or greater.

[0299] In some embodiments, the activatable antibody comprises one or more site-specific amino acid sequence modifications such that the number of lysine and/or cysteine residues is increased or decreased with respect to the original amino acid sequence of the activatable antibody, thus in some embodiments correspondingly increasing or decreasing the number of agents that can be conjugated to the activatable antibody, or in some embodiments limiting the conjugation of the agents to the activatable antibody in a site-specific manner. In some embodiments, the modified activatable antibody is modified with one or more non-natural amino acids in a site-specific manner, thus in some embodiments limiting the conjugation of the agents to only the sites of the non-natural amino acids.

[0300] In some embodiments, the agent is an anti-inflammatory agent.

[0301] In some embodiments, the activatable antibody also includes a detectable moiety. In some embodiments, the detectable moiety is a diagnostic agent.

[0302] In some embodiments, the activatable antibody also includes a signal peptide. In some embodiments, the signal peptide is conjugated to the activatable antibody via a spacer. In some embodiments, the spacer is conjugated to the activatable antibody in the absence of a signal peptide. In some embodiments, the spacer is joined directly to the MM of the activatable antibody. In some embodiments, the spacer is joined directly to the MM of the activatable antibody in the structural arrangement from N-terminus to C-terminus of spacer-MM-CM-AB. An example of a spacer joined directly to the N-terminus of MM of the activatable antibody is QGQSGQ (SEQ ID NO: 424). Other examples of a spacer joined directly to the N-terminus of MM of the activatable antibody include QGQSGQG (SEQ ID NO: 645), QGQSG (SEQ ID NO: 646), QGQS (SEQ ID NO: 647), QGQ (SEQ ID NO: 648), QG (SEQ ID NO: 649), and Q. Other examples of a spacer joined directly to the N-terminus of MM of the activatable antibody include GQSGQG (SEQ ID NO: 666), QSGQG (SEQ ID NO: 667), SGQG (SEQ ID NO: 668), GQG (SEQ ID NO: 669), and G. In some embodiments, no spacer is joined to the N-terminus of the MM. In some embodiments, the spacer includes at least the amino acid sequence QGQSGQ (SEQ ID NO: 424). In some embodiments, the spacer includes at least the amino acid sequence QGQSGQG (SEQ ID NO: 645). In some embodiments, the spacer includes at least the amino acid sequence QGQSG (SEQ ID NO: 646). In some embodiments, the spacer includes at least the amino acid sequence QGQS (SEQ ID NO: 647). In some embodiments, the spacer includes at least the amino acid sequence QGQ (SEQ ID NO: 648). In some embodiments, the spacer includes at least the amino acid sequence QG (SEQ ID NO: 649). In some embodiments, the spacer includes at least the amino acid residue Q. In some embodiments, the spacer includes at least the amino acid sequence GQSGQG (SEQ ID NO: 666). In some embodiments, the spacer includes at least the amino acid sequence QSGQG (SEQ ID NO: 667). In some embodiments, the spacer includes at least the amino acid sequence SGQG (SEQ ID NO: 668). In some embodiments, the spacer includes at least the amino acid sequence GQG (SEQ ID NO: 669). In some embodiments, the spacer includes at least the amino acid sequence G. In some embodiments, the spacer is absent.

[0303] In some embodiments, the AB of the activatable antibody naturally contains one or more disulfide bonds. In some embodiments, the AB can be engineered to include one or more disulfide bonds.

[0304] In some embodiments, activatable antibody or antigen binding fragment thereof is conjugated to an agent. In some embodiments, the activatable antibody comprises an antibody or antigen binding fragment thereof cross-competes with (inhibits the binding of) an isolated antibody that comprises the VH CDR1 sequence GFTFSNYWMN (SEQ ID NO: 10) or GFTFSNYWMD (SEQ ID NO: 11); the VH CDR2 sequence EIRLKSYNYATH (SEQ ID NO: 12); the VH CDR3 sequence AGTDY (SEQ ID NO: 13); the VL CDR1 sequence KASQSVRTDVA (SEQ ID NO: 14) or RASQSVRTDVG (SEQ ID NO: 15); the VL CDR2 sequence YSSNRYT (SEQ ID NO: 16); and the VL CDR3 sequence QQDYSSPFT (SEQ ID NO: 17) or QQDYSSPYT (SEQ ID NO: 18). In some embodiments, the activatable antibody comprises an antibody or antigen binding fragment thereof cross-competes with (inhibits the binding of) an isolated antibody that comprises a heavy chain variable region comprising an amino acid sequence selected from the group consisting of SEQ ID NOs: 1-3, and a light chain variable region comprising an amino acid sequence selected from the group consisting of SEQ ID NOs: 5-9. In some embodiments, the agent is a toxin or fragment thereof. In some embodiments, the agent is a microtubule inhibitor. In some embodiments, the agent is a nucleic acid damaging agent. In some embodiments, the agent is selected from the group consisting of a dolastatin or a derivative thereof, an auristatin or a derivative thereof, a maytansinoid or a derivative thereof, a duocarmycin or a derivative thereof, a calicheamicin or a derivative thereof, and a pyrrolobenzodiazepine or a derivative thereof. In some embodiments, the agent is auristatin E or a derivative thereof. In some embodiments, the agent is monomethyl auristatin E (MMAE). In some embodiments, the agent is monomethyl auristatin D (MMAD). In some embodiments, the agent is a maytansinoid selected from the group consisting of DM1 and DM4. In some embodiments, the agent is maytansinoid DM4. In some embodiments, the agent is duocarmycin. In some embodiments, the agent is conjugated to the AB via a linker. In some embodiments, the linker with which the agent is conjugated to the AB comprises an SPDB moiety, a vc moiety, or a PEG2-vc moiety. In some embodiments, the linker and toxin conjugated to the AB comprises an SPDB-DM4 moiety, a vc-MMAD moiety, a vc-MMAE moiety, vc-duocarmycin, or a PEG2-vc-MMAD moiety. In some embodiments, the linker is a cleavable linker. In some embodiments, the linker is a non-cleavable linker. In some embodiments, the agent is a detectable moiety. In some embodiments, the detectable moiety is a diagnostic agent.

[0305] In some embodiments, the conjugated activatable antibody comprises a conjugated activatable antibody that, in an activated state, binds CD147 comprising: an antibody or an antigen binding fragment thereof (AB) that specifically binds to mammalian CD147, wherein the AB specifically binds human CD147 and cynomolgus monkey CD147; a masking moiety (MM) that inhibits the binding of the AB to CD147 when the activatable antibody is in an uncleaved state; a cleavable moiety (CM) coupled to the AB, wherein the CM is a polypeptide that functions as a substrate for a protease; and an agent conjugated to the AB. In some embodiments, the agent is selected from the group consisting of a dolastatin or a derivative thereof, an auristatin or a derivative thereof, a maytansinoid or a derivative thereof, a duocarmycin or a derivative thereof, a calicheamicin or a derivative thereof, and a pyrrolobenzodiazepine or a derivative thereof. In some embodiments, the agent is selected from the group consisting of auristatin E, monomethyl auristatin F (MMAF), monomethyl auristatin E (MMAE), monomethyl auristatin D (MMAD), maytansinoid DM4, maytansinoid DM1, a duocarmycin, a pyrrolobenzodiazepine, and a pyrrolobenzodiazepine dimer. In some embodiments, the agent is conjugated to the AB via a linker. In some embodiments, the linker with which the agent is conjugated to the AB comprises an SPDB moiety, a vc moiety, or a PEG2-vc moiety. In some embodiments, the linker and toxin conjugated to the AB comprises an SPDB-DM4 moiety, a vc-MMAD moiety, a vc-MMAE moiety, vc-duocarmycin, or a PEG2-vc-MMAD moiety. In some embodiments, the AB of the conjugated activatable antibody or antigen binding fragment thereof comprises the VH CDR1 sequence GFTFSNYWMN (SEQ ID NO: 10) or GFTFSNYWMD (SEQ ID NO: 11); the VH CDR2 sequence EIRLKSYNYATH (SEQ ID NO: 12); the VH CDR3 sequence AGTDY (SEQ ID NO: 13); the VL CDR1 sequence KASQSVRTDVA (SEQ ID NO: 14) or RASQSVRTDVG (SEQ ID NO: 15); the VL CDR2 sequence YSSNRYT (SEQ ID NO: 16); and the VL CDR3 sequence QQDYSSPFT (SEQ ID NO: 17) or QQDYSSPYT (SEQ ID NO: 18). In some embodiments, the AB of the conjugated activatable antibody or antigen binding fragment thereof comprises a heavy chain variable region comprising an amino acid sequence selected from the group consisting of SEQ ID NOs: 1-3, and a light chain variable region comprising an amino acid sequence selected from the group consisting of SEQ ID NOs: 5-9. In some embodiments, the MM comprises an amino acid sequence selected from the group consisting of SEQ ID NOs: 30-100. In some embodiments, the MM comprises an amino acid sequence selected from the group consisting of SEQ ID NOs: 30-100. In some embodiments, the CM comprises an amino acid sequence selected from the group consisting of SEQ ID NOs: 356-423, 680-698, 713, 714, and 789-808. In some embodiments, the CM comprises an amino acid sequence selected from the group consisting of SEQ ID NOs: 359, 370, 377, 382, 390, 397, 406-423, 680-698, 713, 714, and 807-808. In some embodiments, the activatable antibody comprises a combination of amino acid sequences, wherein the combination of amino acid sequences is selected from a single row in Table 4, wherein for a given combination, (a) the heavy chain of the AB comprises the amino acid sequences of the VH CDR sequences corresponding to the given combination in the single row listed in Table 4, (b) the light chain of the AB comprises the amino acid sequences of the VL CDR sequences corresponding to the given combination in the single row listed in Table 4, (c) the MM comprises the amino acid sequence of the mask sequence (MM) corresponding to the given combination in the single row listed in Table 4, and (d) the CM comprises the amino acid sequence of the substrate sequence (CM) corresponding to the given combination in the single row listed in Table 4. In some embodiments, the activatable antibody comprises a combination of amino acid sequences, wherein for a given combination of amino acid sequences. (a) the heavy chain of the AB comprises the amino acid sequences of the VH sequence or VH CDR sequences selected from the group consisting of: the VH sequence or VH CDR sequences listed in the corresponding column of Table 5, (b) the light chain of the AB comprises the amino acid sequences of the VL sequence or VL CDR sequences selected from the group consisting of: the VL sequence or VL CDR sequences listed in the corresponding column of Table 5, (c) the MM comprises the amino acid sequence of the mask sequence (MM) selected from the group consisting of: the MM sequences listed in the corresponding column of Table 5, and (d) the CM comprises the amino acid sequence of the substrate sequence (CM) selected from the group consisting of: the CM sequences listed in the corresponding column of Table 5. In some embodiments, the activatable antibody comprises: a heavy chain comprising an amino acid sequence selected from the group consisting of SEQ ID NOs: 1-4 or 19-22, and a light chain comprising an amino acid sequence selected from the group consisting of SEQ ID NOs: 5-9, 23-27, 140-182, 185-227, 230-272, and 275-317.

[0306] In some embodiments, the conjugated activatable antibody comprises a conjugated activatable antibody that, in an activated state, binds to CD147, comprising: an antibody or an antigen binding fragment thereof (AB) that specifically binds to mammalian CD147, wherein the AB specifically binds human CD147 and cynomolgus monkey CD147; a masking moiety (MM) that inhibits the binding of the AB to CD147 when the activatable antibody is in an uncleaved state; a cleavable moiety (CM) coupled to the AB, wherein the CM is a polypeptide that functions as a substrate for a protease; and an agent conjugated to the AB, wherein the AB comprises: (i) the VH CDR1 sequence GFTFSNYWMN (SEQ ID NO: 10) or GFTFSNYWMD (SEQ ID NO: 11); the VH CDR2 sequence EIRLKSYNYATH (SEQ ID NO: 12); the VH CDR3 sequence AGTDY (SEQ ID NO: 13); the VL CDR1 sequence KASQSVRTDVA (SEQ ID NO: 14) or RASQSVRTDVG (SEQ ID NO: 15); the VL CDR2 sequence YSSNRYT (SEQ ID NO: 16); and the VL CDR3 sequence QQDYSSPFT (SEQ ID NO: 17) or QQDYSSPYT (SEQ ID NO: 18), or (ii) a heavy chain variable region comprising an amino acid sequence selected from the group consisting of SEQ ID NOs: 1-3, and a light chain variable region comprising an amino acid sequence selected from the group consisting of SEQ ID NOs: 5-9, or (iii) a heavy chain comprising an amino acid sequence selected from the group consisting of SEQ ID NOs: 1-4 or 19-22, and a light chain comprising an amino acid sequence selected from the group consisting of SEQ ID NOs: 5-9, 23-27, 140-182, 185-227, 230-272, and 275-317; and wherein the agent is selected from the group consisting of auristatin E, monomethyl auristatin F (MMAF), monomethyl auristatin E (MMAE), monomethyl auristatin D (MMAD), maytansinoid DM4, maytansinoid DM1, a pyrrolobenzodiazepine, a pyrrolobenzodiazepine dimer, and a duocarmycin. In some embodiments, the MM comprises an amino acid sequence selected from the group consisting of SEQ ID NOs: 30-100. In some embodiments, the MM comprises an amino acid sequence selected from the group consisting of SEQ ID NOs: 30, 31, 33, 44, 46, 75-80, 82, 83, and 86-100. In some embodiments, the CM comprises an amino acid sequence selected from the group consisting of SEQ ID NOs: 356-423, 680-698, 713, 714, and 789-808. In some embodiments, the CM comprises an amino acid sequence selected from the group consisting of SEQ ID NOs: 359, 370, 377, 382, 390, 397, 406-423, 680-698, 713, 714, and 807-808. In some embodiments, the agent is conjugated to the AB via a linker, and wherein the linker to which the agent is conjugated to the AB comprises an SPDB moiety, a vc moiety, or a PEG2-vc moiety. In some embodiments, the linker and toxin conjugated to the AB comprises an SPDB-DM4 moiety, a vc-MMAD moiety, a vc-MMAE moiety, vc-duocarmycin, or a PEG2-vc-MMAD moiety.

[0307] In some embodiments, the conjugated activatable antibody comprises a conjugated activatable antibody or conjugated antibody comprising: an antibody or antigen binding fragment thereof (AB) that, in an activated state, binds CD147; and a toxin conjugated to the AB via a linker, wherein the conjugated activatable antibody or the conjugated antibody comprises amino acid sequences, a linker, and a toxin selected from a single row in Table 9, wherein for the given combination: (a) the AB comprises a heavy chain comprising the amino acid sequence of the heavy chain sequence or heavy chain variable domain sequence corresponding to the given combination in the single row listed in Table 9, (b) the AB comprises a light chain comprising the amino acid sequence of the light chain sequence or light chain variable domain sequence corresponding to the given combination in the single row listed in Table 9, and (c) the linker and the toxin comprise the linker and the toxin corresponding to the given combination in the single row listed in Table 9.

[0308] In some embodiments, the activatable antibody is encoded by a nucleic acid sequence that comprises a nucleic acid sequence encoding a heavy chain variable region amino acid sequence selected from the group consisting of SEQ ID NOs: 1-4. In some embodiments, the activatable antibody is encoded by a nucleic acid sequence that comprises a nucleic acid sequence encoding a heavy chain variable region amino acid sequence selected from the group consisting of SEQ ID NOs: 1-3.

[0309] In some embodiments, the activatable antibody is encoded by a nucleic acid sequence that comprises a nucleic acid sequence encoding a light chain variable region amino acid sequence selected from the group consisting of SEQ ID NOs: 5-9. In some embodiments, the activatable antibody is encoded by a nucleic acid sequence that comprises a nucleic acid sequence encoding a light chain variable region amino acid sequence selected from the group consisting of SEQ ID NOs: 5-8.

[0310] In some embodiments, the activatable antibody is encoded by a nucleic acid sequence that comprises a nucleic acid sequence encoding a heavy chain variable region amino acid sequence selected from the group consisting of SEQ ID NOs: 1-4, and a nucleic acid sequence encoding a light chain variable region amino acid sequence selected from the group consisting of SEQ ID NOs: 5-9.

[0311] In some embodiments, the activatable antibody is encoded by a nucleic acid sequence that comprises a nucleic acid sequence encoding a heavy chain variable region amino acid sequence selected from the group consisting of SEQ ID NOs: 1-3, and a nucleic acid sequence encoding a light chain variable region amino acid sequence selected from the group consisting of SEQ ID NOs: 5-8.

[0312] In some embodiments, the activatable antibody is encoded by a nucleic acid sequence that comprises a nucleic acid sequence that is at least 90%, 91%, 92%, 93%, 94%, 95%, 96%, 97%, 98% or 99% identical to a nucleic acid sequence encoding a heavy chain variable region amino acid sequence selected from the group consisting of SEQ ID NOs: 1-4. In some embodiments, the activatable antibody is encoded by a nucleic acid sequence that comprises a nucleic acid sequence that is at least 90%, 91%, 92%, 93%, 94%, 95%, 96%, 97%, 98% or 99% identical to a nucleic acid sequence encoding a heavy chain variable region amino acid sequence comprising selected from the group consisting of SEQ ID NOs: 1-3.

[0313] In some embodiments, the activatable antibody is encoded by a nucleic acid sequence that comprises a nucleic acid sequence that is at least 90%, 91%, 92%, 93%, 94%, 95%, 96%, 97%, 98% or 99% identical to a nucleic acid sequence encoding a light variable region chain amino acid sequence selected from the group consisting of SEQ ID NOs: 5-9. In some embodiments, the activatable antibody is encoded by a nucleic acid sequence that comprises a nucleic acid sequence that is at least 90%, 91%, 92%, 93%, 94%, 95%, 96%, 97%, 98% or 99% identical to a nucleic acid sequence encoding a light chain variable region amino acid sequence selected from the group consisting of SEQ ID NOs: 5-8.

[0314] In some embodiments, the activatable antibody is encoded by a nucleic acid sequence that comprises a nucleic acid sequence that is at least 90%, 91%, 92%, 93%, 94%, 95%, 96%, 97%, 98% or 99% identical to a nucleic acid sequence encoding a heavy chain variable region amino acid sequence selected from the group consisting of SEQ ID NOs: 1-4, and a nucleic acid sequence that is at least 90%, 91%, 92%, 93%, 94%, 95%, 96%, 97%, 98% or 99% identical to a nucleic acid sequence encoding a light chain variable region amino acid sequence selected from the group consisting of SEQ ID NOs: 5-9.

[0315] In some embodiments, the activatable antibody is encoded by a nucleic acid sequence that comprises a nucleic acid sequence that is at least 90%, 91%, 92%, 93%, 94%, 95%, 96%, 97%, 98% or 99%, identical to a nucleic acid sequence encoding a heavy chain variable region amino acid sequence selected from the group consisting of SEQ ID NOs: 1-3, and a nucleic acid sequence that is at least 90%, 91%, 92%, 93%, 94%, 95%, 96%, 97%, 98% or 99% identical to a nucleic acid sequence encoding a light chain variable region amino acid sequence selected from the group consisting of SEQ ID NOs: 5-8.

[0316] In some embodiments, the activatable antibody is encoded by a nucleic acid sequence that comprises a nucleic acid sequence encoding a heavy chain variable region amino acid sequence selected from the group consisting of the heavy chain variable region sequences shown in Table 1. In some embodiments, the activatable antibody is encoded by a nucleic acid sequence that comprises a nucleic acid sequence encoding a light chain variable region amino acid sequence selected from the group consisting of the light chain variable region sequences shown in Table 1. In some embodiments, the activatable antibody is encoded by a nucleic acid sequence that comprises a nucleic acid sequence encoding a heavy chain variable region amino acid sequence selected from the group consisting of the heavy chain variable region sequences shown in Table 1 and a nucleic acid sequence encoding a light chain variable region amino acid sequence selected from the group consisting of the light chain variable region sequences shown in Table 1.

[0317] In some embodiments, the activatable antibody is encoded by a nucleic acid sequence that comprises a nucleic acid sequence encoding a heavy chain variable region amino acid sequence that is at least 90%, 91%, 92%, 93%, 94%, 95%, 96%, 97%, 98% or 99% identical to an amino acid sequence selected from the group consisting of the heavy chain variable region sequences shown in Table 1. In some embodiments, the activatable antibody is encoded by a nucleic acid sequence that comprises a nucleic acid sequence encoding a light chain variable region amino acid sequence that is at least 90%, 91%, 92%, 93%, 94%, 95%, 96%, 97%, 98% or 99% identical to an amino acid sequence selected from the group consisting of the light chain variable region sequences shown in Table 1. In some embodiments, the activatable antibody is encoded by a nucleic acid sequence that comprises a nucleic acid sequence encoding a heavy chain variable region amino acid sequence that is at least 90%, 91%, 92%, 93%, 94%, 95%, 96%, 97%, 98% or 99% identical to an amino acid sequence selected from the group consisting of the heavy chain variable region sequences shown in Table 1 and a nucleic acid sequence that comprises a nucleic acid sequence encoding a light chain variable region amino acid sequence that is at least 90%, 91%, 92%, 93%, 94%, 95%, 96%, 97%, 98% or 99% identical to an amino acid sequence selected from the group consisting of the light chain variable region sequences shown in Table 1.

[0318] In some embodiments, the activatable antibody is encoded by a nucleic acid sequence that comprises a nucleic acid sequence encoding a combination of a variable heavy chain complementarity determining region 1 (VH CDR1, also referred to herein as CDRH1) sequence, a variable heavy chain complementarity determining region 2 (VH CDR2, also referred to herein as CDRH2) sequence, a variable heavy chain complementarity determining region 3 (VH CDR3, also referred to herein as CDRH3) sequence, a variable light chain complementarity determining region 1 (VL CDR1, also referred to herein as CDRL1) sequence, a variable light chain complementarity determining region 2 (VL CDR2, also referred to herein as CDRL2) sequence, and a variable light chain complementarity determining region 3 (VL CDR3, also referred to herein as CDRL3) sequence, wherein at least one CDR sequence is selected from the group consisting of a VH CDR1 sequence shown in Table 2; a VH CDR2 sequence shown in Table 2; a VH CDR3 sequence shown in Table 2; a VL CDR1 sequence shown in Table 2; a VL CDR2 sequence shown in Table 2; and a VL CDR3 sequence shown in Table 2.

[0319] In some embodiments, the activatable antibody is encoded by a nucleic acid sequence that comprises a nucleic acid sequence encoding a combination of a VH CDR1 sequence, a VH CDR2 sequence, a VH CDR3 sequence, a VL CDR1 sequence, a VL CDR2 sequence, and a VL CDR3 sequence, wherein at least one CDR sequence is selected from the group consisting of a VH CDR1 sequence that includes a sequence that is at least 90%, 91%, 92%, 93%, 94%, 95%, 96%, 97%, 98%, 99% or more identical to a VH CDR1 sequence shown in Table 2; a VH CD2 sequence that includes a sequence that is at least 90%, 91%, 92%, 93%, 94%, 95%, 96%, 97%, 98%, 99% or more identical to a VH CDR2 sequence shown in Table 2; a VH CDR3 sequence that includes a sequence that is at least 90%, 91%, 92%, 93%, 94%, 95%, 96%, 97%, 98%, 99% or more identical to a VH CDR3 sequence shown in Table 2; a VL CDR1 sequence that includes a sequence that is at least 90%, 91%, 92%, 93%, 94%, 95%, 96%, 97%, 98%, 99% or more identical to a VL CDR1 sequence shown in Table 2; a VL CDR2 sequence that includes a sequence that is at least 90%, 91%, 92%, 93%, 94%, 95%, 96%, 97%, 98%, 99% or more identical to a VL CDR2 sequence shown in Table 2; and a VL CDR3 sequence that includes a sequence that is at least 90%, 91%, 92%, 93%, 94%, 95%, 96%, 97%, 98%, 99% or more identical to a VL CDR3 sequence shown in Table 2.

[0320] In some embodiments, the activatable antibody is encoded by a nucleic acid sequence that comprises a nucleic acid sequence encoding a combination of a VH CDR1 sequence, a VH CDR2 sequence, a VH CDR3 sequence, a VL CDR1 sequence, a VL CDR2 sequence, and a VL CDR3 sequence, wherein the combination is a combination of the six CDR sequences (VH CDR1, VH CDR2, VH CDR3, VL CDR1, VL CDR2, and VL CDR3) shown in a single row in Table 2.

[0321] In some embodiments, the activatable antibody is encoded by a nucleic acid sequence that comprises a nucleic acid sequence encoding a light chain variable region that comprise a combination of a VL CDR1 sequence, a VL CDR2 sequence, and a VL CDR3 sequence, wherein the combination is a combination of the three light chain CDR sequences (VL CDR1. VL CDR2. VL CDR3) shown in a single row in Table 2.

[0322] In some embodiments, the activatable antibody is encoded by a nucleic acid sequence that comprises a nucleic acid sequence encoding a heavy chain variable region that comprise a combination of a VH CDR1 sequence, a VH CDR2 sequence, and a VH CDR3 sequence, wherein the combination is a combination of the three heavy chain CDR sequences (VH CDR1, VH CDR2, VH CDR3) shown in a single row in Table 2.

[0323] In some embodiments, the activatable antibody is encoded by a nucleic acid sequence that comprises a nucleic acid sequence encoding a combination of a VH CDR1 sequence, a VH CDR2 sequence, a VH CDR3 sequence, a VL CDR1 sequence, a VL CDR2 sequence, and a VL CDR3 sequence, wherein each CDR sequence in the combination comprises a sequence that is at least 90%, 91%, 92%, 93%, 94%, 95%, 96%, 97%, 98%, 99% or more identical to the corresponding CDR sequence in a combination of the six CDR sequences (VH CDR1, VH CDR2, VH CDR3, VL CDR1, VL CDR2, and VL CDR3) shown in a single row in Table 2.

[0324] In some embodiments, the activatable antibody is encoded by a nucleic acid sequence that comprises a nucleic acid sequence encoding a heavy chain variable region that comprise a combination of a VH CDR1 sequence, a VH CDR2 sequence, and a VH CDR3 sequence, wherein each CDR sequence in the combination comprises a sequence that is at least 90%, 91%, 92%, 93%, 94%, 95%, 96%, 97%, 98%, 99% or more identical to the corresponding CDR sequence in a combination of three heavy chain CDR sequences (VH CDR1, VH CDR2, VH CDR3) shown in a single row in Table 2.

[0325] In some embodiments, the activatable antibody is encoded by a nucleic acid sequence that comprises a nucleic acid sequence encoding a light chain variable region that comprise a combination of a VL CDR1 sequence, a VL CDR2 sequence, and a VL CDR3 sequence, wherein each CDR sequence in the combination comprises a sequence that is at least 90%, 91%, 92%, 93%, 94%, 95%, 96%, 97%, 98%, 99% or more identical to the corresponding CDR sequence in a combination of three light chain CDR sequences (VL CDR1, VL CDR2, VL CDR3) shown in a single row in Table 2.

[0326] The disclosure also provides methods for producing an activatable antibody of the disclosure by culturing a cell under conditions that lead to expression of the activatable antibody, wherein the cell comprises a nucleic acid molecule of the disclosure or a vector of the disclosure.

[0327] The disclosure also provides methods of manufacturing an activatable antibody that, in an activated state, binds CD147, the method comprising: (a) culturing a cell comprising a nucleic acid construct that encodes the activatable antibody under conditions that lead to expression of the activatable antibody, wherein the activatable antibody comprises an activatable antibody of the disclosure; and (b) recovering the activatable antibody.

[0328] In some embodiments, the activatable antibody includes one or more polypeptides that include the combination of sequences in a given row of Table 4 or any combination of a mask sequence (MM), a substrate sequence (CM), a light chain variable domain sequence or light chain variable domain CDR sequences, and a heavy chain variable domain sequence or heavy chain variable domain CDR sequences of Table 5.

TABLE 4
CD147 Activatable Antibody Combinations

| | | | VL CDRs | VH CDRs |
|---|---|---|---|---|
| Comb. | Mask Sequence | Substrate Sequence | SEQ ID | SEQ ID |
| No. | (MM) | (CM) | NOs | NOs |
| 1 | THGPCHFKPNCSYPT | LSGRSDNH | 15, 16, | 11, 12, |
| | (SEQ ID NO: 75) | (SEQ ID NO: 359) | 18 | 13 |
| 2 | THGPCHFKPNCSYPT | ISSGLLSS | 15, 16, | 11, 12, |
| | (SEQ ID NO: 75) | (SEQ ID NO: 382) | 18 | 13 |
| 3 | THGPCHFKPNCSYPT | LSGRSGNH | 15, 16, | 11, 12, |
| | (SEQ ID NO: 75) | (SEQ ID NO: 789) | 18 | 13 |
| 4 | THGPCHFKPNCSYPT | AVGLLAPP | 15, 16, | 11, 12, |
| | (SEQ ID NO: 75) | (SEQ ID NO: 390) | 18 | 13 |
| 5 | THGPCHFKPNCSYPT | VHMPLGFLGP | 15, 16, | 11, 12, |
| | (SEQ ID NO: 75) | (SEQ ID NO: 370) | 18 | 13 |
| 6 | THGPCHFKPNCSYPT | TSTSGRSANTRG | 15, 16, | 11, 12, |
| | (SEQ ID NO: 75) | (SEQ ID NO: 397) | 18 | 13 |
| 7 | THGPCHFKPNCSYPT | QNQALRMA | 15, 16, | 11, 12, |
| | (SEQ ID NO: 75) | (SEQ ID NO: 377) | 18 | 13 |
| 8 | THGPCHFKPNCSYPT | ISSGLLSGRSDNH | 15, 16, | 11, 12, |
| | (SEQ ID NO: 75) | (SEQ ID NO: 406) | 18 | 13 |
| 9 | THGPCHFKPNCSYPT | ISSGLLSGRSGNH | 15, 16, | 11, 12, |
| | (SEQ ID NO: 75) | (SEQ ID NO: 423) | 18 | 13 |
| 10 | THGPCHFKPNCSYPT | ISSGLLSGRSANPRG | 15, 16, | 11, 12, |
| | (SEQ ID NO: 75) | (SEQ ID NO: 680) | 18 | 13 |
| 11 | THGPCHFKPNCSYPT | AVGLLAPPTSGRSANPRG | 15, 16, | 11, 12, |
| | (SEQ ID NO: 75) | (SEQ ID NO: 681) | 18 | 13 |
| 12 | THGPCHFKPNCSYPT | AVGLLAPPSGRSANPRG | 15, 16, | 11, 12, |
| | (SEQ ID NO: 75) | (SEQ ID NO: 682) | 18 | 13 |
| 13 | THGPCHFKPNCSYPT | ISSGLLSGRSDDH | 15, 16, | 11, 12, |
| | (SEQ ID NO: 75) | (SEQ ID NO: 683) | 18 | 13 |
| 14 | THGPCHFKPNCSYPT | ISSGLLSGRSDIH | 15, 16, | 11, 12, |
| | (SEQ ID NO: 75) | (SEQ ID NO: 684) | 18 | 13 |
| 15 | THGPCHFKPNCSYPT | ISSGLLSGRSDQH | 15, 16, | 11, 12, |
| | (SEQ ID NO: 75) | (SEQ ID NO: 685) | 18 | 13 |
| 16 | THGPCHFKPNCSYPT | ISSGLLSGRSDTH | 15, 16, | 11, 12, |
| | (SEQ ID NO: 75) | (SEQ ID NO: 686) | 18 | 13 |
| 17 | THGPCHFKPNCSYPT | ISSGLLSGRSDYH | 15, 16, | 11, 12, |
| | (SEQ ID NO: 75) | (SEQ ID NO: 687) | 18 | 13 |
| 18 | THGPCHFKPNCSYPT | ISSGLLSGRSDNP | 15, 16, | 11, 12, |
| | (SEQ ID NO: 75) | (SEQ ID NO: 688) | 18 | 13 |
| 19 | THGPCHFKPNCSYPT | ISSGLLSGRSANP | 15, 16, | 11, 12, |
| | (SEQ ID NO: 75) | (SEQ ID NO: 689) | 18 | 13 |
| 20 | THGPCHFKPNCSYPT | ISSGLLSGRSANI | 15, 16, | 11, 12, |
| | (SEQ ID NO: 75) | (SEQ ID NO: 690) | 18 | 13 |
| 21 | THGPCHEKTNCSYPT | ISSGLLSGRSDNI | 15, 16, | 11, 12, |
| | (SEQ ID NO: 75) | (SEQ ID NO: 713) | 18 | 13 |
| 22 | THGPCHFKPNCSYPT | AVGLLAPPGGLSGRSDNH | 15, 16, | 11, 12, |
| | (SEQ ID NO: 75) | (SEQ ID NO: 412) | 18 | 13 |
| 23 | THGPCHFKPNCSYPT | AVGLLAPPGGLSGRSDDH | 15, 16, | 11, 12, |
| | (SEQ ID NO: 75) | (SEQ ID NO: 691) | 18 | 13 |
| 24 | THGPCHFKPNCSYPT | AVGLLAPPGGLSGRSDIH | 15, 16, | 11, 12, |
| | (SEQ ID NO: 75) | (SEQ ID NO: 692) | 18 | 13 |
| 25 | THGPCHFKPNCSYPT | AVGLLAPPGGLSGRSDQH | 15, 16, | 11, 12, |
| | (SEQ ID NO: 75) | (SEQ ID NO: 693) | 18 | 13 |
| 26 | THGPCHFKPNCSYPT | AVGLLAPPGGLSGRSDTH | 15, 16, | 11, 12, |
| | (SEQ ID NO: 75) | (SEQ ID NO: 694) | 18 | 13 |
| 27 | THGPCHFKPNCSYPT | AVGLLAPPGGLSGRSDYH | 15, 16, | 11, 12, |
| | (SEQ ID NO: 75) | (SEQ ID NO: 695) | 18 | 13 |
| 28 | THGPCHFKPNCSYPT | AVGLLAPPGGLSGRSDNP | 15, 16, | 11, 12, |
| | (SEQ ID NO: 75) | (SEQ ID NO: 696) | 18 | 13 |
| 29 | THGPCHFKPNCSYPT | AVGLLAPPGGLSGRSANP | 15, 16, | 11, 12, |
| | (SEQ ID NO: 75) | (SEQ ID NO: 697) | 18 | 13 |
| 30 | THGPCHFKPNCSYPT | AVGLLAPPGGLSGRSANI | 15, 16, | 11, 12, |
| | (SEQ ID NO: 75) | (SEQ ID NO: 698) | 18 | 13 |
| 31 | THGPCHFKPNCSYPT | AVGLLAPPGGLSGRSDNI | 15, 16, | 11, 12, |
| | (SEQ ID NO: 75) | (SEQ ID NO: 714) | 18 | 13 |
| 32 | THGPCHFKPNCSYPT | ISSGLLSSGGSGGSLSGRSDNH | 15, 16, | 11, 12, |
| | (SEQ ID NO: 75) | (SEQ ID NO: 407) | 18 | 13 |
| 33 | AHGPCHYNTECNSNK | LSGRDNH | 15, 16, | 11, 12, |
| | (SEQ ID NO: 78) | (SEQ ID NO: 359) | 18 | 13 |
| 34 | AHGPCHYNTECNSNK | ISSGLLSS | 15, 16, | 11, 12, |
| | (SEQ ID NO: 78) | (SEQ ID NO: 382) | 18 | 13 |
| 35 | AHGPCHYNTECNSNK | LSGRSGNH | 15, 16, | 11, 12, |
| | (SEQ ID NO: 78) | (SEQ ID NO: 789) | 18 | 13 |
| 36 | AHGPCHYNTECNSNK | AVGLLAPP | 15, 16, | 11, 12, |
| | (SEQ ID NO: 78) | (SEQ ID NO: 390) | 18 | 13 |
| 37 | AHGPCHYNTECNSNK | VHMPLGFLGP | 15, 16, | 11, 12, |
| | (SEQ ID NO: 78) | (SEQ ID NO: 370) | 18 | 13 |
| 38 | AHGPCHYNTECNSNK | TSTSGRSANPRG | 15, 16, | 11, 12, |
| | (SEQ ID NO: 78) | (SEQ ID NO: 397) | 18 | 13 |
| 39 | AHGPCHYNTECNSNK | QNQALRMA | 15, 16, | 11, 12, |
| | (SEQ ID NO: 78) | (SEQ ID NO: 377) | 18 | 13 |
| 40 | AHGPCHYNTECNSNK | ISSGLLSGRSDNH | 15, 16, | 11, 12, |
| | (SEQ ID NO: 78) | (SEQ ID NO: 406) | 18 | 13 |
| 41 | AHGPCHYNTECNSNK | ISSGLLSGRSGNH | 15, 16, | 11, 12, |
| | (SEQ ID NO: 78) | (SEQ ID NO: 423) | 18 | 13 |
| 42 | AHGPCHYNTECNSNK | ISSGLLSGRSANPRG | 15, 16, | 11, 12, |
| | (SEQ ID NO: 78) | (SEQ ID NO: 680) | 18 | 13 |
| 43 | AHGPCHYNTECNSNK | AVGLLAPPTSGRSANPRG | 15, 16, | 11, 12, |
| | (SEQ ID NO: 78) | (SEQ ID NO: 681) | 18 | 13 |
| 44 | AHGPCHYNTECNSNK | AVGLLAPPSGRSANPRG | 15, 16, | 11, 12, |
| | (SEQ ID NO: 78) | (SEQ ID NO: 682) | 18 | 13 |
| 45 | AHGPCHYNTECNSNK | ISSGLLSGRSDDH | 15, 16, | 11, 12, |
| | (SEQ ID NO: 78) | (SEQ ID NO: 683) | 18 | 13 |
| 46 | AHGPCHYNTECNSNK | ISSGLLSGRSDIH | 15, 16, | 11, 12, |
| | (SEQ ID NO: 78) | (SEQ ID NO: 684) | 18 | 13 |
| 47 | AHGPCHYNTECNSNK | ISSGLLSGRSDQH | 15, 16, | 11, 12, |
| | (SEQ ID NO: 78) | (SEQ ID NO: 685) | 18 | 13 |
| 48 | AHGPCHYNTECNSNK | ISSGLLSGRSDTH | 15, 16, | 11, 12, |
| | (SEQ ID NO: 78) | (SEQ ID NO: 686) | 18 | 13 |
| 49 | AHGPCHYNTECNSNK | ISSGLLSGRSDYH | 15, 16, | 11, 12, |
| | (SEQ ID NO: 78) | (SEQ ID NO: 687) | 18 | 13 |
| 50 | AHGPCHYNTECNSNK | ISSGLLSGRSDNP | 15, 16, | 11, 12, |
| | (SEQ ID NO: 78) | (SEQ ID NO: 688) | 18 | 13 |
| 51 | AHGPCHYNTECNSNK | ISSGLLSGRSANP | 15, 16, | 11, 12, |
| | (SEQ ID NO: 78) | (SEQ ID NO: 689) | 18 | 13 |
| 52 | AHGPCHYNTECNSNK | ISSGLLSGRSANI | 15, 16, | 11, 12, |
| | (SEQ ID NO: 78) | (SEQ ID NO: 690) | 18 | 13 |
| 53 | AHGPCHYNTECNSNK | ISSGLLSGRSDNI | 15, 16, | 11, 12, |
| | (SEQ ID NO: 78) | (SEQ ID NO: 713) | 18 | 13 |
| 54 | AHGPCHYNTECNSNK | AVGLLAPPGGLSGRSDNH | 15, 16, | 11, 12, |
| | (SEQ ID NO: 78) | (SEQ ID NO: 412) | 18 | 13 |
| 55 | AHGPCHYNTECNSNK | AVGLLAPPGGLSGRSDDH | 15, 16, | 11, 12, |
| | (SEQ ID NO: 78) | (SEQ ID NO: 691) | 18 | 13 |
| 56 | AHGPCHYNTECNSNK | AVGLLAPPGGLSGRSDIH | 15, 16, | 11, 12, |
| | (SEQ ID NO: 78) | (SEQ ID NO: 692) | 18 | 13 |
| 57 | AHGPCHYNTECNSNK | AVGLLAPPGGLSGRSDQH | 15, 16, | 11, 12, |
| | (SEQ ID NO: 78) | (SEQ ID NO: 693) | 18 | 13 |
| 58 | AHGPCHYNTECNSNK | AVGLLAPPGGLSGRSDTH | 15, 16, | 11, 12, |
| | (SEQ ID NO: 78) | (SEQ ID NO: 694) | 18 | 13 |
| 59 | AHGPCHYNTECNSNK | AVGLLAPPGGLSGRSDYH | 15, 16, | 11, 12, |
| | (SEQ ID NO: 78) | (SEQ ID NO: 695) | 18 | 13 |
| 60 | AHGPCHYNTECNSNK | AVGLLAPPGGLSGRSDNP | 15, 16, | 11, 12, |
| | (SEQ ID NO: 78) | (SEQ ID NO: 696) | 18 | 13 |
| 61 | AHGPCHYNTECNSNK | AVGLLAPPGGLSGRSANP | 15, 16, | 11, 12, |
| | (SEQ ID NO: 78) | (SEQ ID NO: 697) | 18 | 13 |
| 62 | AHGPCHYNTECNSNK | AVGLLAPPGGLSGRSANI | 15, 16, | 11, 12, |
| | (SEQ ID NO: 78) | (SEQ ID NO: 698) | 18 | 13 |
| 63 | AHGPCHYNTECNSNK | AVGLLAPPGGLSGRSDNI | 15, 16, | 11, 12, |
| | (SEQ ID NO: 78) | (SEQ ID NO: 714) | 18 | 13 |
| 64 | AHGPCHYNTECNSNK | ISSGLLSSGGSGGSLSGRSDNH | 15, 16, | 11, 12, |
| | (SEQ ID NO: 78) | (SEQ ID NO: 407) | 18 | 13 |
| 65 | TCLHLTRFNYLSCNK | LSGRSDNH | 15, 16, | 11, 12, |
| | (SEQ ID NO: 88) | (SEQ ID NO: 359) | 18 | 13 |
| 66 | TCLHLTRFNYLSCNK | ISSGLLSS | 15, 16, | 11, 12, |
| | (SEQ ID NO: 88) | (SEQ ID NO: 382) | 18 | 13 |
| 67 | TCLHLTRFNYLSCNK | LSGRSGNH | 15, 16, | 11, 12, |
| | (SEQ ID NO: 88) | (SEQ ID NO: 789) | 18 | 13 |
| 68 | TCLHLTRFNYLSCNK | AVGLLAPP | 15, 16, | 11, 12, |
| | (SEQ ID NO: 88) | (SEQ ID NO: 390) | 18 | 13 |
| 69 | TCLHLTRFNYLSCNK | VHMPLGFLGP | 15, 16, | 11, 12, |
| | (SEQ ID NO: 88) | (SEQ ID NO: 370) | 18 | 13 |
| 70 | TCLHLTRFNYLSCNK | TSTSGRSANPRG | 15, 16, | 11, 12, |
| | (SEQ ID NO: 88) | (SEQ ID NO: 397) | 18 | 13 |
| 71 | TCLHLTRFNYLSCNK | QNQALRMA | 15, 16, | 11, 12, |
| | (SEQ ID NO: 88) | (SEQ ID NO: 377) | 18 | 13 |
| 72 | TCLHLTRFNYLSCNK | ISSGLLSGRSDNH | 15, 16, | 11, 12, |
| | (SEQ ID NO: 88) | (SEQ ID NO: 406) | 18 | 13 |
| 73 | TCLHLTRENYLSCNK | ISSGLLSGRSGNH | 15, 16, | 11, 12, |
| | (SEQ ID NO: 88) | (SEQ ID NO: 423) | 18 | 13 |
| 74 | TCLHLTRENYLSCNK | ISSGLLSGRSANPRG | 15, 16, | 11, 12, |
| | (SEQ ID NO: 88) | (SEQ ID NO: 680) | 18 | 13 |
| 75 | TCLHLTRENYLSCNK | AVGLLAPPTSGRSANPRG | 15, 16, | 11, 12, |
| | (SEQ ID NO: 88) | (SEQ ID NO: 681) | 18 | 13 |
| 76 | TCLHLTRENYLSCNK | AVGLLAPPSGRSANPRG | 15, 16, | 11, 12, |
| | (SEQ ID NO: 88) | (SEQ ID NO: 682) | 18 | 13 |
| 77 | TCLHLTRENYLSCNK | ISSGLLSGRSDDH | 15, 16, | 11, 12, |
| | (SEQ ID NO: 88) | (SEQ ID NO: 683) | 18 | 13 |
| 78 | TCLHLTRENYLSCNK | ISSGLLSGRSDIH | 15, 16, | 11, 12, |
| | (SEQ ID NO: 88) | (SEQ ID NO: 684) | 18 | 13 |
| 79 | TCLHLTRENYLSCNK | ISSGLLSGRSDQH | 15, 16, | 11, 12, |
| | (SEQ ID NO: 88) | (SEQ ID NO: 685) | 18 | 13 |
| 80 | TCLHLTRENYLSCNK | ISSGLLSGRSDTH | 15, 16, | 11, 12, |
| | (SEQ ID NO: 88) | (SEQ ID NO: 686) | 18 | 13 |
| 81 | TCLHLTRENYLSCNK | ISSGLLSGRSDYH | 15, 16, | 11, 12, |
| | (SEQ ID NO: 88) | (SEQ ID NO: 687) | 18 | 13 |
| 82 | TCLHLTRENYLSCNK | ISSGLLSGRSDNP | 15, 16, | 11, 12, |
| | (SEQ ID NO: 88) | (SEQ ID NO: 688) | 18 | 13 |
| 83 | TCLHLTRENYLSCNK | ISSGLLSGRSANP | 15, 16, | 11, 12, |
| | (SEQ ID NO: 88) | (SEQ ID NO: 689) | 18 | 13 |
| 84 | TCLHLTRENYLSCNK | ISSGLLSGRSANI | 15, 16, | 11, 12, |
| | (SEQ ID NO: 88) | (SEQ ID NO: 690) | 18 | 13 |
| 85 | TCLHLTRENYLSCNK | ISSGLLSGRSDNI | 15, 16, | 11, 12, |
| | (SEQ ID NO: 88) | (SEQ ID NO: 713) | 18 | 13 |
| 86 | TCLHLTRENYLSCNK | AVGLLAPPGGLSGRSDNH | 15, 16, | 11, 12, |
| | (SEQ ID NO: 88) | (SEQ ID NO: 412) | 18 | 13 |
| 87 | TCLHLTRENYLSCNK | AVGLLAPPGGLSGRSDDH | 15, 16, | 11, 12, |
| | (SEQ ID NO: 88) | (SEQ ID NO: 691) | 18 | 13 |
| 88 | TCLHLTRENYLSCNK | AVGLLAPPGGLSGRSDIH | 15, 16, | 11, 12, |
| | (SEQ ID NO: 88) | (SEQ ID NO: 692) | 18 | 13 |
| 89 | TCLHLTRENYLSCNK | AVGLLAPPGGLSGRSDQH | 15, 16, | 11, 12, |
| | (SEQ ID NO: 88) | (SEQ ID NO: 693) | 18 | 13 |
| 90 | TCLHLTRENYLSCNK | AVGLLAPPGGLSGRSDTH | 15, 16, | 11, 12, |
| | (SEQ ID NO: 88) | (SEQ ID NO: 694) | 18 | 13 |
| 91 | TCLHLTRENYLSCNK | AVGLLAPPGGLSGRSDYH | 15, 16, | 11, 12, |
| | (SEQ ID NO: 88) | (SEQ ID NO: 695) | 18 | 13 |
| 92 | TCLHLTRENYLSCNK | AVGLLAPPGGLSGRSDNP | 15, 16, | 11, 12, |
| | (SEQ ID NO: 88) | (SEQ ID NO: 696) | 18 | 13 |
| 93 | TCLHLTRENYLSCNK | AVGLLAPPGGLSGRSANP | 15, 16, | 11, 12, |
| | (SEQ ID NO: 88) | (SEQ ID NO: 697) | 18 | 13 |
| 94 | TCLHLTRENYLSCNK | AVGLLAPPGGLSGRSANI | 15, 16, | 11, 12, |
| | (SEQ ID NO: 88) | (SEQ ID NO: 698) | 18 | 13 |
| 95 | TCLHLTRENYLSCNK | AVGLLAPPGGLSGRSDNI | 15, 16, | 11, 12, |
| | (SEQ ID NO: 88) | (SEQ ID NO: 714) | 18 | 13 |
| 96 | TCLHLTRFNYLSCNK | ISSGLLSSGGSGGSLSGRSDNH | 15, 16, | 11, 12, |
| | (SEQ ID NO: 88) | (SEQ ID NO: 407) | 18 | 13 |
| 97 | LHGPCHYDLKCK | LSGRSDNH | 15, 16, | 11, 12, |
| | (SEQ ID NO: 96) | (SEQ ID NO: 359) | 18 | 13 |
| 98 | LHGPCHYDLKCK | ISSGLLSS | 15, 16, | 11, 12, |
| | (SEQ ID NO: 96) | (SEQ ID NO: 382) | 18 | 13 |
| 99 | LHGPCHYDLKCK | LSGRSGNH | 15, 16, | 11, 12, |
| | (SEQ ID NO: 96) | (SEQ ID NO: 789) | 18 | 13 |
| 100 | LHGPCHYDLKCK | AVGLLAPP | 15, 16, | 11, 12, |
| | (SEQ ID NO: 96) | (SEQ ID NO: 390) | 18 | 13 |
| 101 | LHGPCHYDLKCK | VHMPLGFLGP | 15, 16, | 11, 12, |
| | (SEQ ID NO: 96) | (SEQ ID NO: 370) | 18 | 13 |
| 102 | LHGPCHYDLKCK | TSTSGRSANPRG | 15, 16, | 11, 12, |
| | (SEQ ID NO: 96) | (SEQ ID NO: 397) | 18 | 13 |
| 103 | LHGPCHYDLKCK | QNQALRMA | 15, 16, | 11, 12, |
| | (SEQ ID NO: 96) | (SEQ ID NO: 377) | 18 | 13 |
| 104 | LHGPCHYDLKCK | ISSGLLSGRSDNH | 15, 16, | 11, 12, |
| | (SEQ ID NO: 96) | (SEQ ID NO: 406) | 18 | 13 |
| 105 | LHGPCHYDLKCK | ISSGLLSGRSGNH | 15, 16, | 11, 12, |
| | (SEQ ID NO: 96) | (SEQ ID NO: 423) | 18 | 13 |
| 106 | LHGPCHYDLKCK | ISSGLLSGRSANPRG | 15, 16, | 11, 12, |
| | (SEQ ID NO: 96) | (SEQ ID NO: 680) | 18 | 13 |
| 107 | LHGPCHYDLKCK | AVGLLAPPTSGRSANPRG | 15, 16, | 11, 12, |
| | (SEQ ID NO: 96) | (SEQ ID NO: 681) | 18 | 13 |
| 108 | LHGPCHYDLKCK | AVGLLAPPSGRSANPRG | 15, 16, | 11, 12, |
| | (SEQ ID NO: 96) | (SEQ ID NO: 682) | 18 | 13 |
| 109 | LHGPCHYDLKCK | ISSGLLSGRSDDH | 15, 16, | 11, 12, |
| | (SEQ ID NO: 96) | (SEQ ID NO: 683) | 18 | 13 |
| 110 | LHGPCHYDLKCK | ISSGLLSGRSDIH | 15, 16, | 11, 12, |
| | (SEQ ID NO: 96) | (SEQ ID NO: 684) | 18 | 13 |
| 111 | LHGPCHYDLKCK | ISSGLLGSRSDQH | 15, 16, | 11, 12, |
| | (SEQ ID NO: 96) | (SEQ ID NO: 685) | 18 | 13 |
| 112 | LHGPCHYDLKCK | ISSGLLSGRSDTH | 15, 16, | 11, 12, |
| | (SEQ ID NO: 96) | (SEQ ID NO: 686) | 18 | 13 |
| 113 | LHGPCHYDLKCK | ISSGLLSGRSDYH | 15, 16, | 11, 12, |
| | (SEQ ID NO: 96) | (SEQ ID NO: 687) | 18 | 13 |
| 114 | LHGPCHYDLKCK | ISSGLLSGRSDNP | 15, 16, | 11, 12, |
| | (SEQ ID NO: 96) | (SEQ ID NO: 688) | 18 | 13 |
| 115 | LHGPCHYDLKCK | ISSGLLSGRSANP | 15, 16, | 11, 12, |
| | (SEQ ID NO: 96) | (SEQ ID NO: 689) | 18 | 13 |
| 116 | LHGPCHYDLKCK | ISSGLLSGRSANI | 15, 16, | 11, 12, |
| | (SEQ ID NO: 96) | (SEQ ID NO: 690) | 18 | 13 |
| 117 | LHGPCHYDLKCK | ISSGLLSGRSDNI | 15, 16, | 11, 12, |
| | (SEQ ID NO: 96) | (SEQ ID NO: 713) | 18 | 13 |
| 118 | LHGPCHYDLKCK | AVGLLAPPGGLSGRSDNH | 15, 16, | 11, 12, |
| | (SEQ ID NO: 96) | (SEQ ID NO: 412) | 18 | 13 |
| 119 | LHGPCHYDLKCK | AVGLLAPPGGLSGRSDDH | 15, 16, | 11, 12, |
| | (SEQ ID NO: 96) | (SEQ ID NO: 691) | 18 | 13 |
| 120 | LHGPCHYDLKCK | AVGLLAPPGGLSGRSDIH | 15, 16, | 11, 12, |
| | (SEQ ID NO: 96) | (SEQ ID NO: 692) | 18 | 13 |
| 121 | LHGPCHYDLKCK | AVGLLAPPGGLSGRSDQH | 15, 16, | 11, 12, |
| | (SEQ ID NO: 96) | (SEQ ID NO: 693) | 18 | 13 |
| 122 | LHGPCHYDLKCK | AVGLLAPPGGLSGRSDTH | 15, 16, | 11, 12, |
| | (SEQ ID NO: 96) | (SEQ ID NO: 694) | 18 | 13 |
| 123 | LHGPCHYDLKCK | AVGLLAPPGGLSGRSDYH | 15, 16, | 11, 12, |
| | (SEQ ID NO: 96) | (SEQ ID NO: 695) | 18 | 13 |
| 124 | LHGPCHYDLKCK | AVGLLAPPGGLSGRSDNP | 15, 16, | 11, 12, |
| | (SEQ ID NO: 96) | (SEQ ID NO: 696) | 18 | 13 |
| 125 | LHGPCHYDLKCK | AVGLLAPPGGLSGRSANP | 15, 16, | 11, 12, |
| | (SEQ ID NO: 96) | (SEQ ID NO: 697) | 18 | 13 |
| 126 | LHGPCHYDLKCK | AVGLLAPPGGLSGRSANI | 15, 16, | 11, 12, |
| | (SEQ ID NO: 96) | (SEQ ID NO: 698) | 18 | 13 |
| 127 | LHGPCHYDLKCK | AVGLLAPPGGLSGRSDNI | 15, 16, | 11, 12, |
| | (SEQ ID NO: 96) | (SEQ ID NO: 714) | 18 | 13 |
| 128 | LHGPCHYDLKCK | ISSGLLSSGGSGGSLSGRSDNH | 15, 16, | 11, 12, |
| | (SEQ ID NO: 96) | (SEQ ID NO: 407) | 18 | 13 |
| 129 | TCLHLTRFNYLSC | LSGRSDNH | 15, 16, | 11, 12, |
| | (SEQ ID NO: 100) | (SEQ ID NO: 359) | 18 | 13 |
| 130 | TCLHLTRFNYLSC | ISSGLLSS | 15, 16, | 11, 12, |
| | (SEQ ID NO: 100) | (SEQ ID NO: 382) | 18 | 13 |
| 131 | TCLHLTRFNYLSC | LSGRSGNH | 15, 16, | 11, 12, |
| | (SEQ ID NO: 100) | (SEQ ID NO: 789) | 18 | 13 |
| 132 | TCLHLTRFNYLSC | AVGLLAPP | 15, 16, | 11, 12, |
| | (SEQ ID NO: 100) | (SEQ ID NO: 390) | 18 | 13 |
| 133 | TCLHLTRFNYLSC | VHMPLGFLGP | 15, 16, | 11, 12, |
| | (SEQ ID NO: 100) | (SEQ ID NO: 370) | 18 | 13 |
| 134 | TCLHLTRFNYLSC | TSTSGRSANPRG | 15, 16, | 11, 12, |
| | (SEQ ID NO: 100) | (SEQ ID NO: 397) | 18 | 13 |
| 135 | TCLHLTRFNYLSC | QNQALRMA | 15, 16, | 11, 12, |
| | (SEQ ID NO: 100) | (SEQ ID NO: 377) | 18 | 13 |
| 136 | TCLHLTRFNYLSC | ISSGLLSGRSDNH | 15, 16, | 11, 12, |
| | (SEQ ID NO: 100) | (SEQ ID NO: 406) | 18 | 13 |
| 137 | TCLHLTRFNYLSC | ISSGLLSGRSGNH | 15, 16, | 11, 12, |
| | (SEQ ID NO: 100) | (SEQ ID NO: 423) | 18 | 13 |
| 138 | TCLHLTRFNYLSC | ISSGLLSGRSANPRG | 15, 16, | 11, 12, |
| | (SEQ ID NO: 100) | (SEQ ID NO: 680) | 18 | 13 |
| 139 | TCLHLTRFNYLSC | AVGLLAPPTSGRSANPRG | 15, 16, | 11, 12, |
| | (SEQ ID NO: 100) | (SEQ ID NO: 681) | 18 | 13 |
| 140 | TCLHLTRFNYLSC | AVGLLAPPSGRSANPRG | 15, 16, | 11, 12, |
| | (SEQ ID NO: 100) | (SEQ ID NO: 682) | 18 | 13 |
| 141 | TCLHLTRFNYLSC | ISSGLLSGRSDDH | 15, 16, | 11, 12, |
| | (SEQ ID NO: 100) | (SEQ ID NO: 683) | 18 | 13 |
| 142 | TCLHLTRFNYLSC | ISSGLLSGRSDIH | 15, 16, | 11, 12, |
| | (SEQ ID NO: 100) | (SEQ ID NO: 684) | 18 | 13 |
| 143 | TCLHLTRFNYLSC | ISSGLLSGRSDQH | 15, 16, | 11, 12, |
| | (SEQ ID NO: 100) | (SEQ ID NO: 685) | 18 | 13 |
| 144 | TCLHLTRFNYLSC | ISSGLLSGRSDTH | 15, 16, | 11, 12, |
| | (SEQ ID NO: 100) | (SEQ ID NO: 686) | 18 | 13 |
| 145 | TCLHLTRFNYLSC | ISSGLLSGRSDYH | 15, 16, | 11, 12, |
| | (SEQ ID NO: 100) | (SEQ ID NO: 687) | 18 | 13 |
| 146 | TCLHLTRFNYLSC | ISSGLLSGRSDNP | 15, 16, | 11, 12, |
| | (SEQ ID NO: 100) | (SEQ ID NO: 688) | 18 | 13 |
| 147 | TCLHLTRFNYLSC | ISSGLLSGRSANP | 15, 16, | 11, 12, |
| | (SEQ ID NO: 100) | (SEQ ID NO: 689) | 18 | 13 |
| 148 | TCLHLTRFNYLSC | ISSGLLSGRSANI | 15, 16, | 11, 12, |
| | (SEQ ID NO: 100) | (SEQ ID NO: 690) | 18 | 13 |
| 149 | TCLHLTRFNYLSC | ISSGLLSGRSDNI | 15, 16, | 11, 12, |
| | (SEQ ID NO: 100) | (SEQ ID NO: 713) | 18 | 13 |
| 150 | TCLHLTRFNYLSC | AVGLLAPPGGLSGRSDNH | 15, 16, | 11, 12, |
| | (SEQ ID NO: 100) | (SEQ ID NO: 412) | 18 | 13 |
| 151 | TCLHLTRFNYLSC | AVGLLAPPGGLSGRSDDH | 15, 16, | 11, 12, |
| | (SEQ ID NO: 100) | (SEQ ID NO: 691) | 18 | 13 |
| 152 | TCLHLTRFNYLSC | AVGLLAPPGGLSGRSDIH | 15, 16, | 11, 12, |
| | (SEQ ID NO: 100) | (SEQ ID NO: 692) | 18 | 13 |
| 153 | TCLHLTRFNYLSC | AVGLLAPPGGLSGRSDQH | 15, 16, | 11, 12, |
| | (SEQ ID NO: 100) | (SEQ ID NO: 698) | 18 | 13 |
| 154 | TCLHLTRFNYLSC | AVGLLAPPGGLSGRSDTH | 15, 16, | 11, 12, |
| | (SEQ ID NO: 100) | (SEQ ID NO: 694) | 18 | 13 |
| 155 | TCLHLTRFNYLSC | AVGLLAPPGGLSGRSDYH | 15, 16, | 11, 12, |
| | (SEQ ID NO: 100) | (SEQ ID NO: 695) | 18 | 13 |
| 156 | TCLHLTRFNYLSC | AVGLLAPPGGLSGRSDNP | 15, 16, | 11, 12, |
| | (SEQ ID NO: 100) | (SEQ ID NO: 696) | 18 | 13 |
| 157 | TCLHLTRFNYLSC | AVGLLAPPGGLSGRSANP | 15, 16, | 11, 12, |
| | (SEQ ID NO: 100) | (SEQ ID NO: 697) | 18 | 13 |
| 158 | TCLHLTRFNYLSC | AVGLLAPPGGLSGRSANI | 15, 16, | 11, 12, |
| | (SEQ ID NO: 100) | (SEQ ID NO: 698) | 18 | 13 |
| 159 | TCLHLTRFNYLSC | AVGLLAPPGGLSGRSDNI | 15, 16, | 11, 12, |
| | (SEQ ID NO: 100) | (SEQ ID NO: 714) | 18 | 13 |
| 160 | TCLHLTRFNYLSC | ISSGLLSSGGSGGSLSGRSDNH | 15, 16, | 11, 12, |
| | (SEQ ID NO: 100) | (SEQ ID NO: 407) | 18 | 13 |

TABLE 5
CD147 Activatable Antibody Components

| Mask Sequence | Substrate Sequence | VL or | VH or |
|---|---|---|---|
| (MM) | (CM) | VL CDRs | VH CDRs |
| RYQSCHSYWCTEGNH | LSGRSDNH | SEQ ID | SEQ ID |
| (SEQ ID NO: 30) | (SEQ ID NO: 359) | NOS: 15, 16, | NOS: 11, 12, |
| | | 18 | 13 |
| QSLFCSGFRCDQYAS | TGRGPSWV | SEQ ID | SEQ ID |
| (SEQ ID NO: 31) | (SEQ ID NO: 356) | NOS: 14, 16, | NOS: 10, 12, |
| | | 17 | 13 |
| DHGPCHYVSCTTINH | PLTGRSGG | SEQ ID NO: 23 | SEQ ID |
| (SEQ ID NO: 33) | (SEQ ID NO: 362) | | NO: 19 |
| VHGPCHWSVECLSNV | TARGPSFK | SEQ ID NO: 24 | SEQ ID |
| (SEQ ID NO: 44) | (SEQ ID NO: 358) | | NO: 20 |
| HGPCHYNFNSGCAQF | NTLSGRSENHSG | SEQ ID NO: 25 | SEQ ID |
| (SEQ ID NO: 46) | (SEQ ID NO: 395) | | NO: 21 |
| THGPCHFKPNCSYPT | NTLSGRSGNHGS | SEQ ID NO: 26 | |
| (SEQ ID NO: 75) | (SEQ ID NO: 396) | | |
| LHGPCHYDLKCKNNT | TSTSGRSANPRG | | |
| (SEQ ID NO: 76) | (SEQ ID NO: 397) | | |
| SHGPCHFDYQCINNT | TSGRSANP | | |
| (SEQ ID NO: 77) | (SEQ ID NO: 398) | | |
| AHGPCHYNTECNSNK | VHMPLGFLGP | | |
| (SEQ ID NO: 78) | (SEQ ID NO: 370) | | |
| LHGPCHYMNTCHNVK | AVGLLAPP | | |
| (SEQ ID NO: 79) | (SEQ ID NO: 390) | | |
| LHGPCHFNNCNTLKL | AQNLLGMV | | |
| (SEQ ID NO: 80) | (SEQ ID NO: 378) | | |
| WHGPCHYTKCDDHTM | QNQALRMA | | |
| (SEQ ID NO: 82) | (SEQ ID NO: 377) | | |
| THGPCHYKECDWMTI | LAAPLGLL | | |
| (SEQ ID NO: 83) | (SEQ ID NO: 389) | | |
| KHGPCHFRLCPQNTS | STFPFGMF | | |
| (SEQ ID NO: 86) | (SEQ ID NO: 379) | | |
| WQRECSOKNTCQYYI | ISSGLLSS | | |
| (SEQ ID NO: 87) | (SEQ ID NO: 382) | | |
| TCLHLTRFNYLSCNK | PAGLWLDP | | |
| (SEQ ID NO: 88) | (SEQ ID NO: 392) | | |
| FSCGFRGGYMRLCGG | VAGRSMRP | | |
| (SEQ ID NO: 89) | (SEQ ID NO: 399) | | |
| THGPCHFKPNC | VVPEGRRS | | |
| (SEQ ID NO: 90) | (SEQ ID NO: 400) | | |
| THGPCHFKPQCSYPT | ILPRSPAF | | |
| (SEQ ID NO: 91) | (SEQ ID NO: 401) | | |
| THGPCHFKPNCAYPT | MVLGRSLL | | |
| (SEQ ID NO: 92) | (SEQ ID NO: 402) | | |
| THGPCHFRPNCAYPT | QGRAITFI | | |
| (SEQ ID NO: 93) | (SEQ ID NO: 403) | | |
| LHGPCHYDLKCKQNT | SPRSIMLA | | |
| (SEQ ID NO: 94) | (SEQ ID NO: 404) | | |
| LHGPCHYDLKCKNN | SMLRSMPL | | |
| (SEQ ID NO: 95) | (SEQ ID NO: 405) | | |
| LHGPCHYDLKCK | ISSGLLSGRSDNH | | |
| (SEQ ID NO: 96) | (SEQ ID NO: 406) | | |
| LHGPCHYDLKC | AVGLLAPPGGLSGRSDNH | | |
| (SEQ ID NO: 97) | (SEQ ID NO: 412) | | |
| LHGPCHYDLRC | ISSGLLSSGGSGGSLSGRSDNH | | |
| (SEQ ID NO: 98) | (SEQ ID NO: 407) | | |
| LHGPCHFNNCNTL | LSGRSGNH | | |
| (SEQ ID NO: 99) | (SEQ ID NO: 789) | | |
| TCLHLTRFNYLSC | SGRSANPRG | | |
| (SEQ ID NO: 100) | (SEQ ID NO: 790) | | |
| | LSGRSDDH | | |
| | (SEQ ID NO: 791) | | |
| | LSGRSDIH | | |
| | (SEQ ID NO: 792) | | |
| | LSGRSDQH | | |
| | (SEQ ID NO: 793) | | |
| | LSGRSDTH | | |
| | (SEQ ID NO: 794) | | |
| | LSGRSDYH | | |
| | (SEQ ID NO: 795) | | |
| | LSGRSDNP | | |
| | (SEQ ID NO: 796) | | |
| | LSGRSANP | | |
| | (SEQ ID NO: 797) | | |
| | LSGRSANI | | |
| | (SEQ ID NO: 798) | | |
| | LSGRSDNI | | |
| | (SEQ ID NO: 799) | | |
| | MIAPVAYR | | |
| | (SEQ ID NO: 800) | | |
| | RPSPMWAY | | |
| | (SEQ ID NO: 801) | | |
| | WATPRPMR | | |
| | (SEQ ID NO: 802) | | |
| | FRLLDWQW | | |
| | (SEQ ID NO: 803) | | |
| | ISSGL | | |
| | (SEQ ID NO: 804) | | |
| | ISSGLLS | | |
| | (SEQ ID NO: 805) | | |
| | ISSGLL | | |
| | (SEQ ID NO: 806) | | |
| | ISSGLLSGRSANPRG | | |
| | (SEQ ID NO: 680) | | |
| | AVGLLAPPTSGRSANPRG | | |
| | (SEQ ID NO: 681) | | |
| | AVGLLAPPSGRSANPRG | | |
| | (SEQ ID NO: 682) | | |
| | ISSGLLSGRSDDH | | |
| | (SEQ ID NO: 683) | | |
| | ISSGLLSGRSDIH | | |
| | (SEQ ID NO: 684) | | |
| | ISSGLLSGRSDQH | | |
| | (SEQ ID NO: 685) | | |
| | ISSGLLSGRSDTH | | |
| | (SEQ ID NO: 686) | | |
| | ISSGLLSGRSDYH | | |
| | (SEQ ID NO: 687) | | |
| | ISSGLLSGRSDNP | | |
| | (SEQ ID NO: 688) | | |
| | ISSGLLSGRSANP | | |
| | (SEQ ID NO: 689) | | |
| | ISSGLLSGRSANI | | |
| | (SEQ ID NO: 690) | | |
| | AVGLLAPPGGLSGRSDDH | | |
| | (SEQ ID NO: 691) | | |
| | AVGLLAPPGGLSGRSDIH | | |
| | (SEQ ID NO: 692) | | |
| | AVGLLAPPGGLSGRSDQH | | |
| | (SEQ ID NO: 693) | | |
| | AVGLLAPPGGLSGRSDTH | | |
| | (SEQ ID NO: 694) | | |
| | AVGLLAPPGGLSGRSDYH | | |
| | (SEQ ID NO: 695) | | |
| | AVGLLAPPGGLSGRSDNP | | |
| | (SEQ ID NO: 696) | | |
| | AVGLLAPPGGLSGRSANP | | |
| | (SEQ ID NO: 697) | | |
| | AVGLLAPPGGLSGRSANI | | |
| | (SEQ ID NO: 698) | | |
| | ISSGLLSGRSDNI | | |
| | (SEQ ID NO: 713) | | |
| | AVGLLAPPGGLSGRSDNI | | |
| | (SEQ ID NO: 714) | | |
| | GLSGRSDNHGGAVGLLAPP | | |
| | (SEQ ID NO: 807) | | |
| | GLSGRSDNHGGVHMPLGFLGP | | |
| | (SEQ ID NO: 808) | | |

[0329] In some embodiments, an activatable antibody of the present disclosure includes one or more polypeptides that include the combination of sequences selected from Table 4 or Table 5, where the polypeptide includes a combination of a masking sequence selected from the column titled “Mask Sequence (MM)” of Table 4 or Table 5, a substrate sequence from the column titled “Substrate Sequence (CM)” of Table 4 or Table 5, a light chain variable domain or light chain CDRs from the column titled “VL or VL CDRs” or “VL CDRs SEQ ID NOs” of Table 4 or Table 5, and a heavy chain variable domain or heavy chain CDRs from the column titled “VH or VH CDRs” or “VH CDRs SEQ ID Nos” of Table 4 or Table 5. For example, an activatable antibody of the present disclosure may include the amino acid sequences of combination no. 147, which includes the masking sequence of SEQ ID NO: 17, the substrate sequence of SEQ ID NO: 412, a light chain variable domain that includes the VL CDR sequences of SEQ ID NOs: 15, 16, and 18, and a heavy chain variable domain that includes the VH CDR sequences of 11, 12, and 13. Therefore, an activatable antibody that includes at least the combination of sequences in any given row of Table 4 is described herein. Similarly, any combination of a mask sequence (MM), a substrate sequence (CM), a light chain variable domain sequence or light chain variable domain CDR sequences, and a heavy chain variable domain sequence or heavy chain variable domain CDR sequences of Table 5 is described herein. An activatable antibody that includes at least any combination of a masking sequence, a substrate sequence, a variable heavy chain or variable heavy chain CDRs, and a variable light chain or variable light chain CDRs selected from the corresponding columns Table 4 or Table 5 is also described herein. In some exemplary embodiments, an activatable antibody that includes at least the combination of sequences in any given row of Table 4 or any combination of a mask sequence (MM), a substrate sequence (CM), a light chain variable domain sequence or light chain variable domain CDR sequences, and a heavy chain variable domain sequence or heavy chain variable domain CDR sequences of Table 5 can be combined with one or more toxins, including a dolastatin or a derivative thereof, an auristatin or a derivative thereof, a maytansinoid or a derivative thereof, a duocarmycin or a derivative thereof, a calicheamicin or a derivative thereof, or a pyrrolobenzodiazepine or a derivative thereof. In some exemplary embodiments, an activatable antibody that includes at least the combination of sequences in any given row of Table 4 or any combination of a mask sequence (MM), a substrate sequence (CM), a light chain variable domain sequence or light chain variable domain CDR sequences, and a heavy chain variable domain sequence or heavy chain variable domain CDR sequences of Table 5 can be combined with one or more toxins, including auristatin E, monomethyl auristatin F (MMAF), monomethyl auristatin E (MMAE), monomethyl auristatin D (MMAD), maytansinoid DM4, maytansinoid DM1, a pyrrolobenzodiazepine, a pyrrolobenzodiazepine dimer, and/or a duocarmycin.

[0330] Any of the combinations in Table 4 or Table 5 as described above can be combined with human immunoglobulin constant regions to result in fully human IgGs including IgG1, IgG2, IgG4 or mutated constant regions to result in human IgGs with altered functions such as IgG N297A, IgG1 N297Q, or IgG4 S228P. The combinations described in Table 4 or Table 5 are not limited by the particular combinations shown in any given row, and thus may include any mask sequence from column 2 of Table 4 (or column 1 of Table 5) combined with any substrate sequence from column 3 of Table 4 (or column 2 of Table 5) combined with any VL sequence or set of VL CDR sequences from column 4 of Table 4 (or column 3 or Table 5) combined with any VH sequence or set of VH CDR sequences from column 5 of Table 4 (or column 4 of Table 5). In addition to the mask sequences disclosed in column 2 of Table 4 or column 1 of Table 5, any mask sequence disclosed herein can be used in a combination. In addition to the substrate sequences disclosed in column 3 of Table 4 or column 2 of Table 5, any CM disclosed herein can be used in a combination. In addition to the light chain variable region sequence or light chain CDR sequences disclosed in column 4 of Table 4 or column 3 of Table 5, any light chain variable region sequence or light chain CDR sequences disclosed herein can be used in a combination. In addition to the heavy chain variable region sequence or heavy chain CDR sequences disclosed in column 5 of Table 4 or column 4 of Table 5, any heavy chain variable region sequence or heavy chain CDR sequences disclosed herein can be used in a combination.

[0331] In some embodiments, the serum half-life of the activatable antibody is longer than that of the corresponding antibody; e.g., the pK of the activatable antibody is longer than that of the corresponding antibody. In some embodiments, the serum half-life of the activatable antibody is similar to that of the corresponding antibody. In some embodiments, the serum half-life of the activatable antibody is at least 15 days when administered to an organism. In some embodiments, the serum half-life of the activatable antibody is at least 12 days when administered to an organism. In some embodiments, the serum half-life of the activatable antibody is at least 11 days when administered to an organism. In some embodiments, the serum half-life of the activatable antibody is at least 10 days when administered to an organism. In some embodiments, the serum half-life of the activatable antibody is at least 9 days when administered to an organism. In some embodiments, the serum half-life of the activatable antibody is at least 8 days when administered to an organism. In some embodiments, the serum half-life of the activatable antibody is at least 7 days when administered to an organism. In some embodiments, the serum half-life of the activatable antibody is at least 6 days when administered to an organism. In some embodiments, the serum half-life of the activatable antibody is at least 5 days when administered to an organism. In some embodiments, the serum half-life of the activatable antibody is at least 4 days when administered to an organism. In some embodiments, the serum half-life of the activatable antibody is at least 3 days when administered to an organism. In some embodiments, the serum half-life of the activatable antibody is at least 2 days when administered to an organism. In some embodiments, the serum half-life of the activatable antibody is at least 24 hours when administered to an organism. In some embodiments, the serum half-life of the activatable antibody is at least 20 hours when administered to an organism. In some embodiments, the serum half-life of the activatable antibody is at least 18 hours when administered to an organism. In some embodiments, the serum half-life of the activatable antibody is at least 16 hours when administered to an organism. In some embodiments, the serum half-life of the activatable antibody is at least 14 hours when administered to an organism. In some embodiments, the serum half-life of the activatable antibody is at least 12 hours when administered to an organism. In some embodiments, the serum half-life of the activatable antibody is at least 10 hours when administered to an organism. In some embodiments, the serum half-life of the activatable antibody is at least 8 hours when administered to an organism. In some embodiments, the serum half-life of the activatable antibody is at least 6 hours when administered to an organism. In some embodiments, the serum half-life of the activatable antibody is at least 4 hours when administered to an organism. In some embodiments, the serum half-life of the activatable antibody is at least 3 hours when administered to an organism.

[0332] The disclosure also provides methods of producing an activatable CD147 antibody polypeptide by culturing a cell under conditions that lead to expression of the polypeptide, wherein the cell comprises an isolated nucleic acid molecule encoding an antibody and/or an activatable antibody described herein, and/or vectors that include these isolated nucleic acid sequences. The disclosure provides methods of producing an antibody and/or activatable antibody by culturing a cell under conditions that lead to expression of the antibody and/or activatable antibody, wherein the cell comprises an isolated nucleic acid molecule encoding an antibody and/or an activatable antibody described herein, and/or vectors that include these isolated nucleic acid sequences.

[0333] The invention also provides a method of manufacturing activatable antibodies that in an activated state binds CD147 by (a) culturing a cell comprising a nucleic acid construct that encodes the activatable antibody under conditions that lead to expression of the activatable antibody, wherein the activatable antibody comprises a masking moiety (MM), a cleavable moiety (CM), and an antibody or an antigen binding fragment thereof (AB) that specifically binds CD147, (i) wherein the CM is a polypeptide that functions as a substrate for a protease; and (ii) wherein the CM is positioned in the activatable antibody such that, when the activatable antibody is in an uncleaved state, the MM interferes with specific binding of the AB to CD147 and in a cleaved state the MM does not interfere or compete with specific binding of the AB to CD147; and (b) recovering the activatable antibody. Suitable AB, MM, and/or CM include any of the AB, MM, and/or CM disclosed herein.

[0334] In some embodiments, the activatable antibody in the uncleaved state has the structural arrangement from N-terminus to C-terminus as follows: MM-CM-AB or AB-CM-MM. In some embodiments, the activatable antibody comprises a linking peptide between the MM and the CM. In some embodiments, the activatable antibody comprises a linking peptide between the CM and the AB. In some embodiments, the activatable antibody comprises a first linking peptide (LP1) and a second linking peptide (LP2), and wherein the activatable antibody in the uncleaved state has the structural arrangement from N-terminus to C-terminus as follows: MM-LP1-CM-LP2-AB or AB-LP2-CM-LP1-MM. In some embodiments, the two linking peptides need not be identical to each other. In some embodiments, the activatable antibody in the uncleaved state has the structural arrangement from N-terminus to C-terminus as follows: spacer-MM-LP1-CM-LP2-AB or AB-LP2-CM-LP1-MM-spacer.

[0335] In some embodiments, at least one of LP1 or LP2 comprises an amino acid sequence selected from the group consisting of (GS)ₙ, (GGS)ₙ, (GSGGS)ₙ (SEQ ID NO: 339) and (GGGS)ₙ (SEQ ID NO: 340), where n is an integer of at least one.

[0336] In some embodiments, at least one of LP1 or LP2 comprises an amino acid sequence selected from the group consisting of GGSG (SEQ ID NO: 341), GGSGG (SEQ ID NO: 342), GSGSG (SEQ ID NO: 343), GSGGG (SEQ ID NO: 344), GGGSG (SEQ ID NO: 345), and GSSSG (SEQ ID NO: 346).

[0337] In some embodiments, LP1 comprises the amino acid sequence GSSGGSGGSGGSG (SEQ ID NO: 347), GSSGGSGGSGG (SEQ ID NO: 348), GSSGGSGGSGGS (SEQ ID NO: 349), GSSGGSGGSGGSGGGS (SEQ ID NO: 350), GSSGGSGGSG (SEQ ID NO: 351), or GSSGGSGGSGS (SEQ ID NO: 352).

[0338] In some embodiments, LP2 comprises the amino acid sequence GSS, GGS, GGGS (SEQ ID NO: 353), GSSGT (SEQ ID NO: 354) or GSSG (SEQ ID NO: 356).

[0339] Conjugated CD147 Antibodies and Activatable Antibodies

[0340] In some embodiments, the CD147 antibodies and activatable antibodies described herein also include an agent conjugated to the antibody/activatable antibody. In some embodiments, the conjugated agent is a therapeutic agent, such as an anti-inflammatory and/or an antineoplastic agent. In such embodiments, the agent is conjugated to a carbohydrate moiety of the antibody/activatable antibody, for example, in some embodiments, where the carbohydrate moiety is located outside the antigen-binding region of the antibody or antigen-binding fragment in the activatable antibody. In some embodiments, the agent is conjugated to a sulfhydryl group of the antibody or antigen-binding fragment in the antibody/activatable antibody.

[0341] In some embodiments, the agent is a cytotoxic agent such as a toxin (e.g., an enzymatically active toxin of bacterial, fungal, plant, or animal origin, or fragments thereof), or a radioactive isotope (i.e., a radioconjugate).

[0342] In some embodiments, the agent is a detectable moiety such as, for example, a label or other marker. For example, the agent is or includes a radiolabeled amino acid, one or more biotinyl moieties that can be detected by marked avidin (e.g., streptavidin containing a fluorescent marker or enzymatic activity that can be detected by optical or calorimetric methods), one or more radioisotopes or radionuclides, one or more fluorescent labels, one or more enzymatic labels, and/or one or more chemiluminescent agents. In some embodiments, detectable moieties are attached by spacer molecules.

[0343] The disclosure also pertains to immunoconjugates comprising an antibody conjugated to a cytotoxic agent such as a toxin (e.g., an enzymatically active toxin of bacterial, fungal, plant, or animal origin, or fragments thereof), or a radioactive isotope (i.e., a radioconjugate). Suitable cytotoxic agents include, for example, dolastatins and derivatives thereof (e.g. auristatin E, AFP, MMAF, MMAE, MMAD, DMAF, DMAE). For example, the agent is monomethyl auristatin E (MMAE) or monomethyl auristatin D (MMAD). In some embodiments, the agent is an agent selected from the group listed in Table 5. In some embodiments, the agent is a dolastatin. In some embodiments, the agent is an auristatin or derivative thereof. In some embodiments, the agent is auristatin E or a derivative thereof. In some embodiments, the agent is monomethyl auristatin E (MMAE). In some embodiments, the agent is monomethyl auristatin D (MMAD). In some embodiments, the agent is a maytansinoid or maytansinoid derivative. In some embodiments, the agent is DM1 or DM4. In some embodiments, the agent is a duocarmycin or derivative thereof. In some embodiments, the agent is a calicheamicin or derivative thereof. In some embodiments, the agent is a pyrrolobenzodiazepine. In some embodiments, the agent is a pyrrolobenzodiazepine dimer.

[0344] Enzymatically active toxins and fragments thereof that can be used include diphtheria A chain, nonbinding active fragments of diphtheria toxin, exotoxin A chain (from Pseudomonas aeruginosa), ricin A chain, abrin A chain, modeccin A chain, alpha-sarcin, Aleurites fordii proteins, dianthin proteins, Phytolaca americana proteins (PAPI, PAPII, and PAP-S), momordica charantia inhibitor, curcin, crotin, sapaonaria officinalis inhibitor, gelonin, mitogellin, restrictocin, phenomycin, enomycin, and the tricothecenes. A variety of radionuclides are available for the production of radioconjugated antibodies. Examples include ²¹²Bi, ¹³¹I, ¹³¹In, ⁹⁰Y, and ¹⁸⁶Re.

[0345] In some embodiments, the agent is a toxin or fragment thereof. In some embodiments, the agent is a microtubule inhibitor. In some embodiments, the agent is a nucleic acid damaging agent. In some embodiments, the agent is selected from the group consisting of a dolastatin or a derivative thereof, an auristatin or a derivative thereof, a maytansinoid or a derivative thereof, a duocarmycin or a derivative thereof, a calicheamicin or a derivative thereof, and a pyrrolobenzodiazepine or a derivative thereof. In some embodiments, the agent is auristatin E or a derivative thereof. In some embodiments, the agent is monomethyl auristatin E (MMAE). In some embodiments, the agent is monomethyl auristatin D (MMAD). In some embodiments, the agent is a maytansinoid selected from the group consisting of DM1 and DM4. In some embodiments, the agent is maytansinoid DM4. In some embodiments, the agent is duocarmycin. In some embodiments, the agent is conjugated to the AB via a linker. In some embodiments, the linker with which the agent is conjugated to the AB comprises an SPDB moiety, a vc moiety, or a PEG2-vc moiety. In some embodiments, the linker and toxin conjugated to the AB comprises an SPDB-DM4 moiety, a vc-MMAD moiety, a vc-MMAE moiety, vc-duocarmycin, or a PEG2-vc-MMAD moiety. In some embodiments, the linker is a cleavable linker. In some embodiments, the linker is a non-cleavable linker. In some embodiments, the agent is a detectable moiety. In some embodiments, the detectable moiety is a diagnostic agent.

[0346] In some embodiments, the conjugated antibody comprises a conjugated antibody comprising: (a) an antibody or an antigen binding fragment thereof (AB) that specifically binds to mammalian CD147, wherein the AB comprises: (i) the VH CDR1 sequence GFTFSNYWMN (SEQ ID NO: 10) or GFTFSNYWMD (SEQ ID NO: 11); the VH CDR2 sequence EIRLKSYNYATH (SEQ ID NO: 12); the VH CDR3 sequence AGTDY (SEQ ID NO: 13); the VL CDR1 sequence KASQSVRTDVA (SEQ ID NO: 14) or RASQSVRTDVG (SEQ ID NO: 15); the VL CDR2 sequence YSSNRYT (SEQ ID NO: 16); and the VL CDR3 sequence QQDYSSPFT (SEQ ID NO: 17) or QQDYSSPYT (SEQ ID NO: 18), or (ii) a heavy chain variable region comprising an amino acid sequence selected from the group consisting of SEQ ID NOs: 1-4, and a light chain variable region comprising an amino acid sequence selected from the group consisting of SEQ ID NOs: 5-9; (b) an agent conjugated to the AB, wherein the agent is selected from the group consisting of auristatin E, monomethyl auristatin F (MMAF), monomethyl auristatin E (MMAE), monomethyl auristatin D (MMAD), maytansinoid DM4, maytansinoid DM1, a pyrrolobenzodiazepine, a pyrrolobenzodiazepine dimer, and a duocarmycin.

[0347] The CD147 antibodies and activatable antibodies of the disclosure have at least one point of conjugation for an agent, but in the methods and compositions provided herein less than all possible points of conjugation are available for conjugation to an agent. In some embodiments, the one or more points of conjugation are sulfur atoms involved in disulfide bonds. In some embodiments, the one or more points of conjugation are sulfur atoms involved in interchain disulfide bonds. In some embodiments, the one or more points of conjugation are sulfur atoms involved in interchain sulfide bonds, but not sulfur atoms involved in intrachain disulfide bonds. In some embodiments, the one or more points of conjugation are sulfur atoms of cysteine or other amino acid residues containing a sulfur atom. Such residues may occur naturally in the antibody structure or can be incorporated into the antibody by site-directed mutagenesis, chemical conversion, or mis-incorporation of non-natural amino acids.

[0348] Also provided are methods of preparing a conjugate of a CD147 antibody/CD147 activatable antibody having one or more interchain disulfide bonds in the AB and one or more intrachain disulfide bonds in the MM, and a drug reactive with free thiols is provided. The method generally includes partially reducing interchain disulfide bonds in the activatable antibody with a reducing agent, such as, for example, TCEP; and conjugating the drug reactive with free thiols to the partially reduced antibody/activatable antibody. As used herein, the term partial reduction refers to situations where an act antibody/activatable antibody is contacted with a reducing agent and less than all disulfide bonds, e.g., less than all possible sites of conjugation are reduced. In some embodiments, less than 99%, 98%, 97%, 96%, 95%, 90%, 85%, 80%, 75%, 70%, 65%, 60%, 55%, 50%, 45%, 40%, 35%, 30%, 25%, 20%, 15%, 10% or less than 5% of all possible sites of conjugation are reduced.

[0349] In yet other embodiments, a method of reducing and conjugating an agent, e.g., a drug, to a CD147 antibody/CD147 activatable antibody resulting in selectivity in the placement of the agent is provided. The method generally includes partially reducing the CD147 antibody/CD147 activatable antibody with a reducing agent such that any conjugation sites in the masking moiety or other non-AB portion of the CD147 antibody/CD147 activatable antibody are not reduced, and conjugating the agent to interchain thiols in the AB. The conjugation site(s) are selected so as to allow desired placement of an agent to allow conjugation to occur at a desired site. The reducing agent is, for example, TCEP. The reduction reaction conditions such as, for example, the ratio of reducing agent to antibody/activatable antibody, the length of incubation, the temperature during the incubation, the pH of the reducing reaction solution, etc., are determined by identifying the conditions that produce a conjugated antibody/activatable antibody e.g. under conditions that produce a conjugated activatable antibody in which the MM retains the ability to effectively and efficiently mask the AB of the activatable antibody in an uncleaved state. The ratio of reduction agent to antibody/activatable antibody will vary depending on the antibody/activatable antibody. In some embodiments, the ratio of reducing agent to antibody/activatable antibody will be in a range from about 20:1 to 1:1, from about 10:1 to 1:1, from about 9:1 to 1:1, from about 8:1 to 1:1, from about 7:1 to 1:1, from about 6:1 to 1:1, from about 5:1 to 1:1, from about 4:1 to 1:1, from about 3:1 to 1:1, from about 2:1 to 1:1, from about 20:1 to 1:1.5, from about 10:1 to 1:1.5, from about 9:1 to 1:1.5, from about 8:1 to 1:1.5, from about 7:1 to 1:1.5, from about 6:1 to 1:1.5, from about 5:1 to 1:1.5, from about 4:1 to 1:1.5, from about 3:1 to 1:1.5, from about 2:1 to 1:1.5, from about 1.5:1 to 1:1.5, or from about 1:1 to 1:1.5. In some embodiments, the ratio is in a range of from about 5:1 to 1:1. In some embodiments, the ratio is in a range of from about 5:1 to 1.5:1. In some embodiments, the ratio is in a range of from about 4:1 to 1:1. In some embodiments, the ratio is in a range from about 4:1 to 1.5:1. In some embodiments, the ratio is in a range from about 8:1 to about 1:1. In some embodiments, the ratio is in a range of from about 2.5:1 to 1:1.

[0350] In some embodiments, the CD147 antibody undergoes conjugation first and is then further modified to include a CM and MM (resulting in an activatable antibody). In some embodiments, the CD147 activatable antibody is conjugated.

[0351] In some embodiments, a method of reducing interchain disulfide bonds in the AB of an activatable CD147 antibody and conjugating an agent, e.g., a thiol-containing agent such as a drug, to the resulting interchain thiols to selectively locate agent(s) on the AB is provided. The method generally includes partially reducing the AB with a reducing agent to form at least two interchain thiols without forming all possible interchain thiols in the activatable antibody; and conjugating the agent to the interchain thiols of the partially reduced AB. For example, the AB of the activatable antibody is partially reduced for about 1 hour at about 37° C. at a desired ratio of reducing agent:activatable antibody. In some embodiments, the ratio of reducing agent to activatable antibody will be in a range from about 20:1 to 1:1, from about 10:1 to 1:1, from about 9:1 to 1:1, from about 8:1 to 1:1, from about 7:1 to 1:1, from about 6:1 to 1:1, from about 5:1 to 1:1, from about 4:1 to 1:1, from about 3:1 to 1:1, from about 2:1 to 1:1, from about 20:1 to 1:1.5, from about 10:1 to 1:1.5, from about 9:1 to 1:1.5, from about 8:1 to 1:1.5, from about 7:1 to 1:1.5, from about 6:1 to 1:1.5, from about 5:1 to 1:1.5, from about 4:1 to 1:1.5, from about 3:1 to 1:1.5, from about 2:1 to 1:1.5, from about 1.5:1 to 1:1.5, or from about 1:1 to 1:1.5. In some embodiments, the ratio is in a range of from about 5:1 to 1:1. In some embodiments, the ratio is in a range of from about 5:1 to 1.5:1. In some embodiments, the ratio is in a range of from about 4:1 to 1:1. In some embodiments, the ratio is in a range from about 4:1 to 1.5:1. In some embodiments, the ratio is in a range from about 8:1 to about 1:1. In some embodiments, the ratio is in a range of from about 2.5:1 to 1:1.

[0352] The thiol-containing reagent can be, for example, cysteine or N-acetyl cysteine. The reducing agent can be, for example, TCEP. In some embodiments, the reduced activatable antibody can be purified prior to conjugation, using for example, column chromatography, dialysis, or diafiltration. Alternatively, the reduced antibody is not purified after partial reduction and prior to conjugation.

[0353] The invention also provides partially reduced antibodies/activatable antibodies in which at least one interchain disulfide bond in the antibody/activatable antibody has been reduced with a reducing agent without disturbing any intrachain disulfide bonds in the antibody/activatable antibody, wherein the activatable antibody includes an antibody or an antigen binding fragment thereof (AB) that specifically binds to CD147, a masking moiety (MM) that inhibits the binding of the AB of the activatable antibody in an uncleaved state to the CD147 target, and a cleavable moiety (CM) coupled to the AB, wherein the CM is a polypeptide that functions as a substrate for a protease. In some embodiments the MM is coupled to the AB via the CM. In some embodiments, one or more intrachain disulfide bond(s) of the antibody/activatable antibody is not disturbed by the reducing agent. In some embodiments, one or more intrachain disulfide bond(s) of the MM within the antibody/activatable antibody is not disturbed by the reducing agent. In some embodiments, the activatable antibody in the uncleaved state has the structural arrangement from N-terminus to C-terminus as follows: MM-CM-AB or AB-CM-MM. In some embodiments, reducing agent is TCEP.

[0354] In yet other embodiments, a method of reducing and conjugating an agent, e.g., a drug, to a CD147 antibody/CD147 activatable antibody resulting in selectivity in the placement of the agent by providing an activatable CD147 antibody with a defined number and positions of lysine and/or cysteine residues. In some embodiments, the defined number of lysine and/or cysteine residues is higher or lower than the number of corresponding residues in the amino acid sequence of the parent antibody or activatable antibody. In some embodiments, the defined number of lysine and/or cysteine residues may result in a defined number of agent equivalents that can be conjugated to the CD147 antibody or activatable CD147 antibody. In some embodiments, the defined number of lysine and/or cysteine residues may result in a defined number of agent equivalents that can be conjugated to the CD147 antibody or activatable CD147 antibody in a site-specific manner. In some embodiments, the modified activatable antibody is modified with one or more non-natural amino acids in a site-specific manner, thus in some embodiments limiting the conjugation of the agents to only the sites of the non-natural amino acids. In some embodiments, the CD147 antibody or activatable CD147 antibody with a defined number and positions of lysine and/or cysteine residues can be partially reduced with a reducing agent as discussed herein such that any conjugation sites in the masking moiety or other non-AB portion of the activatable antibody are not reduced, and conjugating the agent to interchain thiols in the AB.

[0355] The disclosure also provides partially reduced activatable antibodies in which at least one interchain disulfide bond in the activatable antibody has been reduced with a reducing agent without disturbing any intrachain disulfide bonds in the activatable antibody, wherein the activatable antibody includes an antibody or an antigen binding fragment thereof (AB) that specifically binds to the target, e.g., CD147, a masking moiety (MM) that inhibits the binding of the AB of the activatable antibody in an uncleaved state to the target, and a cleavable moiety (CM) coupled to the AB, wherein the CM is a polypeptide that functions as a substrate for at least one protease. In some embodiments, the MM is coupled to the AB via the CM. In some embodiments, one or more intrachain disulfide bond(s) of the activatable antibody is not disturbed by the reducing agent. In some embodiments, one or more intrachain disulfide bond(s) of the MM within the activatable antibody is not disturbed by the reducing agent. In some embodiments, the activatable antibody in the uncleaved state has the structural arrangement from N-terminus to C-terminus as follows: MM-CM-AB or AB-CM-MM. In some embodiments, reducing agent is TCEP.

[0356] In some embodiments, the agent is linked to the AB using a maleimide caproyl-valine-citrulline linker or a maleimide PEG-valine-citrulline linker. In some embodiments, the agent is linked to the AB using a maleimide caproyl-valine-citrulline linker. In some embodiments, the agent is linked to the AB using a maleimide PEG-valine-citrulline linker In some embodiments, the agent is monomethyl auristatin D (MMAD) linked to the AB using a maleimide PEG-valine-citrulline-para-aminobenzyloxycarbonyl linker, and this linker payload construct is referred to herein as “vc-MMAD.” In some embodiments, the agent is monomethyl auristatin E (MMAE) linked to the AB using a maleimide PEG-valine-citrulline-para-aminobenzyloxycarbonyl linker, and this linker payload construct is referred to herein as “vc-MMAE.”In some embodiments, the agent is linked to the AB using a maleimide PEG-valine-citrulline linker In some embodiments, the agent is monomethyl auristatin D (MMAD) linked to the AB using a maleimide bis-PEG-valine-citrulline-para-aminobenzyloxycarbonyl linker, and this linker payload construct is referred to herein as “PEG2-vc-MMAD.” The structures of vc-MMAD, vc-MMAE, and PEG2-vc-MMAD are shown below:

[chemical structure]

[0357] The disclosure also provides conjugated activatable antibodies that include an activatable antibody linked to monomethyl auristatin D (MMAD) payload, wherein the activatable antibody includes an antibody or an antigen binding fragment thereof (AB) that specifically binds to a target, a masking moiety (MM) that inhibits the binding of the AB of the activatable antibody in an uncleaved state to the target, and cleavable moiety (CM) coupled to the AB, and the CM is a polypeptide that functions as a substrate for at least one MMP protease.

[0358] In some embodiments, the MMAD-conjugated activatable antibody can be conjugated using any of several methods for attaching agents to ABs: (a) attachment to the carbohydrate moieties of the AB, or (b) attachment to sulfhydryl groups of the AB, or (c) attachment to amino groups of the AB, or (d) attachment to carboxylate groups of the AB.

[0359] In some embodiments, the MMAD payload is conjugated to the AB via a linker. In some embodiments, the MMAD payload is conjugated to a cysteine in the AB via a linker. In some embodiments, the MMAD payload is conjugated to a lysine in the AB via a linker. In some embodiments, the MMAD payload is conjugated to another residue of the AB via a linker, such as those residues disclosed herein. In some embodiments, the linker is a thiol-containing linker. In some embodiments, the linker is a cleavable linker. In some embodiments, the linker is a non-cleavable linker. In some embodiments, the linker is selected from the group consisting of the linkers shown in Tables 7 and 8. In some embodiments, the activatable antibody and the MMAD payload are linked via a maleimide caproyl-valine-citrulline linker. In some embodiments, the activatable antibody and the MMAD payload are linked via a maleimide PEG-valine-citrulline linker. In some embodiments, the activatable antibody and the MMAD payload are linked via a maleimide caproyl-valine-citrulline-para-aminobenzyloxycarbonyl linker. In some embodiments, the activatable antibody and the MMAD payload are linked via a maleimide PEG-valine-citrulline-para-aminobenzyloxycarbonyl linker. In some embodiments, the MMAD payload is conjugated to the AB using the partial reduction and conjugation technology disclosed herein.

[0360] In some embodiments, the polyethylene glycol (PEG) component of a linker of the present disclosure is formed from 2 ethylene glycol monomers, 3 ethylene glycol monomers, 4 ethylene glycol monomers, 5 ethylene glycol monomers, 6 ethylene glycol monomers, 7 ethylene glycol monomers 8 ethylene glycol monomers, 9 ethylene glycol monomers, or at least 10 ethylene glycol monomers. In some embodiments of the present disclosure, the PEG component is a branched polymer. In some embodiments of the present disclosure, the PEG component is an unbranched polymer. In some embodiments, the PEG polymer component is functionalized with an amino group or derivative thereof, a carboxyl group or derivative thereof, or both an amino group or derivative thereof and a carboxyl group or derivative thereof.

[0361] In some embodiments, the PEG component of a linker of the present disclosure is an amino-tetra-ethylene glycol-carboxyl group or derivative thereof. In some embodiments, the PEG component of a linker of the present disclosure is an amino-tri-ethylene glycol-carboxyl group or derivative thereof. In some embodiments, the PEG component of a linker of the present disclosure is an amino-di-ethylene glycol-carboxyl group or derivative thereof. In some embodiments, an amino derivative is the formation of an amide bond between the amino group and a carboxyl group to which it is conjugated. In some embodiments, a carboxyl derivative is the formation of an amide bond between the carboxyl group and an amino group to which it is conjugated. In some embodiments, a carboxyl derivative is the formation of an ester bond between the carboxyl group and an hydroxyl group to which it is conjugated.

[0362] Conjugates of the antibody and cytotoxic agent are made using a variety of bifunctional protein-coupling agents such as N-succinimidyl-3-(2-pyridyldithiol) propionate (SPDP), iminothiolane (IT), bifunctional derivatives of imidoesters (such as dimethyl adipimidate HCL), active esters (such as disuccinimidyl suberate), aldehydes (such as glutareldehyde), bis-azido compounds (such as bis (p-azidobenzoyl) hexanediamine), bis-diazonium derivatives (such as bis-(p-diazoniumbenzoyl)-ethylenediamine), diisocyanates (such as tolyene 2,6-diisocyanate), and bis-active fluorine compounds (such as 1,5-difluoro-2,4-dinitrobenzene). For example, a ricin immunotoxin can be prepared as described in Vitetta et al., Science 238: 1098 (1987). Carbon-14-labeled 1-isothiocyanatobenzyl-3-methyldiethylene triaminepentaacetic acid (MX-DTPA) is an exemplary chelating agent for conjugation of radionucleotide to the antibody. (See WO94/11026).

[0363] Table 6 lists some of the exemplary pharmaceutical agents that can be employed in the herein described disclosure but in no way is meant to be an exhaustive list.

TABLE 6
Exemplary Pharmaceutical Agents for Conjugation

| | |
|---|---|
| CYTOTOXIC AGENTS | |
| Auristatins | Turbostatin |
| Auristatin E | Phenstatins |
| Monomethyl auristatin D (MMAD) | Hydroxyphenstatin |
| Monomethyl auristatin E (MMAE) | Spongistatin 5 |
| Desmethyl auristatin E (DMAE) | Spongistatin 7 |
| Auristatin F | Halistatin 1 |
| Monomethyl auristatin F (MMAF) | Halistatin 2 |
| Desmethyl auristatin F (DMAF) | Halistatin 3 |
| Auristatin derivatives, e.g., amides thereof | Modified Bryostatins |
| Auristatin tyramine | Halocomstatins |
| Auristatin quinoline | Pyrrolobenzimidazoles (PBI) |
| Dolastatins | Cibrostatin6 |
| Dolastatin derivatives | Doxaliform |
| Dolastatin 16 DmJ | Anthracyclins analogues |
| Dolastatin 16 Dpv | |
| Maytansinoids, e.g. DM-1; DM-4 | |
| Maytansinoid derivatives | Cemadotin analogue (CemCH2-SH) |
| Duocarmycin | Pseudomonas toxin A (PE38) variant |
| Duocarmycin derivatives | Pseudomonas toxin A (ZZ-PE38) variant |
| Alpha-amanitin | ZJ-101 |
| Anthracyclines | OSW-1 |
| Doxorubicin | 4-Nitrobenzyloxycarbonyl Derivatives of |
| | O6-Benzylguanine |
| Daunorubicin | Topoisomerase inhibitors |
| Bryostatins | Hemiasterfin |
| Camptothecin | Cephalotaxine |
| Camptothecin derivatives | Homoharringtonine |
| 7-substituted Camptothecin | Pyrrolobenzodiazepine dimers (PBDs) |
| 10, 11- | Pyrrolobenzodiazepenes |
| Difluoromethylenedioxycamptothecin | |
| Combretastatins | Functionalized pyrrolobenzodiazepenes |
| Debromoaplysiatoxin | Functionalized pyrrolobenzodiazepene |
| | dimers |
| Kahalalide-F | Calicheamicins |
| Discodermolide | Podophyllotoxins |
| Ecteinascidins | Taxanes |
| | Vinca alkaloids |
| ANTIVIRALS | |
| | CONJUGATABLE DETECTION |
| Acyclovir | REAGENTS |
| Vira A | Fluorescein and derivatives thereof |
| Symmetrel | Fluorescein isothiocyanate (MC) |
| ANTIFUNGALS | RADIOPHARMACEUTICALS |
| Nystatin | ¹²⁵I |
| | ¹³¹I |
| ADDITIONAL ANTI-NEOPLASTICS | ⁸⁹Zr |
| Adriamycin | ¹¹¹In |
| Cerubidine | ¹²³I |
| Bleomycin | ¹³¹I |
| Alkeran | ⁹⁹mTc |
| Velban | ²⁰¹Tl |
| Oncovin | ¹³³Xe |
| Fluorouracil | ¹¹C |
| Methotrexate | ⁶²Cu |
| Thiotepa | ¹⁸F |
| Bisantrene | ⁶⁸Ga |
| Novantrone | ¹³N |
| Thioguanine | ¹⁵O |
| Procarabizine | ³⁸K |
| Cytarabine | ⁸²Rb |
| | ⁹⁹mTc (Technetium) |
| ANTI-BACTERIALS | |
| Aminoglycosides | HEAVY METALS |
| Streptomycin | Barium |
| Neomycin | Gold |
| Kanamycin | Platinum |
| Amikacin | |
| Gentamicin | ANTI-MYCOPLASMALS |
| Tobramycin | Tylosine |
| Streptomycin B | Spectinomycin |
| Spectinomycin | |
| Ampicillin | |
| Sulfanilamide | |
| Polymyxin | |
| Chloramphenicol | |

[0364] Those of ordinary skill in the art will recognize that a large variety of possible moieties can be coupled to the resultant antibodies of the disclosure. (See, for example, “Conjugate Vaccines”, Contributions to Microbiology and Immunology, J. M. Cruse and R. E. Lewis, Jr (eds), Carger Press, New York, (1989), the entire contents of which are incorporated herein by reference).

[0365] Coupling can be accomplished by any chemical reaction that will bind the two molecules so long as the antibody and the other moiety retain their respective activities. This linkage can include many chemical mechanisms, for instance covalent binding, affinity binding, intercalation, coordinate binding and complexation. In some embodiments, the binding is, however, covalent binding. Covalent binding can be achieved either by direct condensation of existing side chains or by the incorporation of external bridging molecules. Many bivalent or polyvalent linking agents are useful in coupling protein molecules, such as the antibodies of the present disclosure, to other molecules. For example, representative coupling agents can include organic compounds such as thioesters, carbodiimides, succinimide esters, diisocyanates, glutaraldehyde, diazobenzenes and hexamethylene diamines. This listing is not intended to be exhaustive of the various classes of coupling agents known in the art but, rather, is exemplary of the more common coupling agents. (See Killen and Lindstrom, Jour. Immun. 133:1335-2549 (1984); Jansen et al., Immunological Reviews 62:185-216 (1982); and Vitetta et al., Science 238:1098 (1987).

[0366] In some embodiments, in addition to the compositions and methods provided herein, the activatable antibody can also be modified for site-specific conjugation through modified amino acid sequences inserted or otherwise included in the activatable antibody sequence. These modified amino acid sequences are designed to allow for controlled placement and/or dosage of the conjugated agent within a conjugated activatable antibody. For example, the activatable antibody can be engineered to include cysteine substitutions at positions on light and heavy chains that provide reactive thiol groups and do not negatively impact protein folding and assembly, nor alter antigen binding. In some embodiments, the activatable antibody can be engineered to include or otherwise introduce one or more non-natural amino acid residues within the activatable antibody to provide suitable sites for conjugation. In some embodiments, the activatable antibody can be engineered to include or otherwise introduce enzymatically activatable peptide sequences within the activatable antibody sequence.

[0367] Suitable linkers are described in the literature. (See, for example, Ramakrishnan, S. et al., Cancer Res. 44:201-208 (1984) describing use of MBS (M-maleimidobenzoyl-N-hydroxysuccinimide ester). See also, U.S. Pat. No. 5,030,719, describing use of halogenated acetyl hydrazide derivative coupled to an antibody by way of an oligopeptide linker. In some embodiments, suitable linkers include: (i) EDC (1-ethyl-3-(3-dimethylamino-propyl) carbodiimide hydrochloride; (ii) SMPT (4-succinimidyloxycarbonyl-alpha-methyl-alpha-(2-pridyl-dithio)-toluene (Pierce Chem. Co., Cat. (21558G); (iii) SPDP (succinimidyl-6 [3-(2-pyridyldithio) propionamido]hexanoate (Pierce Chem. Co., Cat #21651G); (iv) Sulfo-LC-SPDP (sulfosuccinimidyl 6 [3-(2-pyridyldithio)-propianamide] hexanoate (Pierce Chem. Co. Cat. #2165-G); and (v) sulfo-NHS (N-hydroxysulfo-succinimide: Pierce Chem. Co., Cat. #24510) conjugated to EDC. Additional linkers include, but are not limited to, SMCC ((succinimidyl 4-(N-maleimidomethyl)cyclohexane-1-carboxylate), sulfo-SMCC (sulfosuccinimidyl 4-(N-maleimidomethyl)cyclohexane-1-carboxylate), SPDB (N-succinimidyl-4-(2-pyridyldithio) butanoate), or sulfo-SPDB (N-succinimidyl-4-(2-pyridyldithio)-2-sulfo butanoate).

[0368] The linkers described above contain components that have different attributes, thus leading to conjugates with differing physio-chemical properties. For example, sulfo-NHS esters of alkyl carboxylates are more stable than sulfo-NHS esters of aromatic carboxylates. NHS-ester containing linkers are less soluble than sulfo-NHS esters. Further, the linker SMPT contains a sterically hindered disulfide bond, and can form conjugates with increased stability. Disulfide linkages, are in general, less stable than other linkages because the disulfide linkage is cleaved in vitro, resulting in less conjugate available. Sulfo-NHS, in particular, can enhance the stability of carbodimide couplings. Carbodimide couplings (such as EDC) when used in conjunction with sulfo-NHS, forms esters that are more resistant to hydrolysis than the carbodimide coupling reaction alone.

[0369] In some embodiments, the linkers are cleavable. In some embodiments, the linkers are non-cleavable. In some embodiments, two or more linkers are present. The two or more linkers are all the same, i.e., cleavable or non-cleavable, or the two or more linkers are different, i.e., at least one cleavable and at least one non-cleavable.

[0370] The present disclosure utilizes several methods for attaching agents to ABs: (a) attachment to the carbohydrate moieties of the AB, or (b) attachment to sulfhydryl groups of the AB, or (c) attachment to amino groups of the AB, or (d) attachment to carboxylate groups of the AB. According to the disclosure, ABs can be covalently attached to an agent through an intermediate linker having at least two reactive groups, one to react with AB and one to react with the agent. The linker, which may include any compatible organic compound, can be chosen such that the reaction with AB (or agent) does not adversely affect AB reactivity and selectivity. Furthermore, the attachment of linker to agent might not destroy the activity of the agent. Suitable linkers for reaction with oxidized antibodies or oxidized antibody fragments include those containing an amine selected from the group consisting of primary amine, secondary amine, hydrazine, hydrazide, hydroxylamine, phenylhydrazine, semicarbazide and thiosemicarbazide groups. Such reactive functional groups may exist as part of the structure of the linker, or can be introduced by suitable chemical modification of linkers not containing such groups.

[0371] According to the present disclosure, suitable linkers for attachment to reduced ABs include those having certain reactive groups capable of reaction with a sulfhydryl group of a reduced antibody or fragment. Such reactive groups include, but are not limited to: reactive haloalkyl groups (including, for example, haloacetyl groups), p-mercuribenzoate groups and groups capable of Michael-type addition reactions (including, for example, maleimides and groups of the type described by Mitra and Lawton, 1979, J. Amer. Chem. Soc. 101: 3097-3110).

[0372] According to the present disclosure, suitable linkers for attachment to neither oxidized nor reduced Abs include those having certain functional groups capable of reaction with the primary amino groups present in unmodified lysine residues in the Ab. Such reactive groups include, but are not limited to, NHS carboxylic or carbonic esters, sulfo-NHS carboxylic or carbonic esters, 4-nitrophenyl carboxylic or carbonic esters, pentafluorophenyl carboxylic or carbonic esters, acyl imidazoles, isocyanates, and isothiocyanates.

[0373] According to the present disclosure, suitable linkers for attachment to neither oxidized nor reduced Abs include those having certain functional groups capable of reaction with the carboxylic acid groups present in aspartate or glutamate residues in the Ab, which have been activated with suitable reagents. Suitable activating reagents include EDC, with or without added NHS or sulfo-NHS, and other dehydrating agents utilized for carboxamide formation. In these instances, the functional groups present in the suitable linkers would include primary and secondary amines, hydrazines, hydroxylamines, and hydrazides.

[0374] The agent can be attached to the linker before or after the linker is attached to the AB. In certain applications it may be desirable to first produce an AB-linker intermediate in which the linker is free of an associated agent. Depending upon the particular application, a specific agent may then be covalently attached to the linker. In some embodiments, the AB is first attached to the MM, CM and associated linkers and then attached to the linker for conjugation purposes.

[0375] Brarched Linkers:

[0376] In specific embodiments, branched linkers that have multiple sites for attachment of agents are utilized. For multiple site linkers, a single covalent attachment to an AB would result in an AB-linker intermediate capable of binding an agent at a number of sites. The sites can be aldehyde or sulfhydryl groups or any chemical site to which agents can be attached.

[0377] In some embodiments, higher specific activity (or higher ratio of agents to AB) can be achieved by attachment of a single site linker at a plurality of sites on the AB. This plurality of sites can be introduced into the AB by either of two methods. First, one may generate multiple aldehyde groups and/or sulfhydryl groups in the same AB. Second, one may attach to an aldehyde or sulfhydryl of the AB a “branched linker” having multiple functional sites for subsequent attachment to linkers. The functional sites of the branched linker or multiple site linker can be aldehyde or sulfhydryl groups, or can be any chemical site to which linkers can be attached. Still higher specific activities can be obtained by combining these two approaches, that is, attaching multiple site linkers at several sites on the AB.

[0378] Cleavable Linkers:

[0379] Peptide linkers that are susceptible to cleavage by enzymes of the complement system, such as but not limited to u-plasminogen activator, tissue plasminogen activator, trypsin, plasmin, or another enzyme having proteolytic activity can be used in one embodiment of the present disclosure. According to one method of the present disclosure, an agent is attached via a linker susceptible to cleavage by complement. The antibody is selected from a class that can activate complement. The antibody-agent conjugate, thus, activates the complement cascade and releases the agent at the target site. According to another method of the present disclosure, an agent is attached via a linker susceptible to cleavage by enzymes having a proteolytic activity such as a u-plasminogen activator, a tissue plasminogen activator, plasmin, or trypsin. These cleavable linkers are useful in conjugated activatable antibodies that include an extracellular toxin, e.g., by way of non-limiting example, any of the extracellular toxins shown in Table 6.

[0380] Non-limiting examples of cleavable linker sequences are provided in Table 7.

TABLE 7
Exemplary Linker Sequences for Conjugation

| Types of Cleavable Sequences | Amino Acid Sequence |
|---|---|
| Plasmin cleavable sequences | |
| Pro-urokinase | PRFKIIGG (SEQ ID NO: 615) |
| | PRFRIIGG (SEQ ID NO: 616) |
| TGFβ | SSRHRRALD (SEQ ID NO: 617) |
| Plasminogen | RKSSIIIRMRDVNTL (SEQ ID NO: 618) |
| Staphylokinase | SSSFDKGKYKKGDDA (SEQ ID NO: 619) |
| | SSSFDKGKYKRGDDA (SEQ ID NO: 620) |
| Factor Xa cleavable sequences | IEGR (SEQ ID NO: 621) |
| | IDGR (SEQ ID NO: 622) |
| | GGSIDGR (SEQ ID NO: 623) |
| MMP cleavable sequences | |
| Gelatinase A | PLGLWA (SEQ ID NO: 624) |
| Collagenase cleavable sequences | |
| Calf skin collagen (α1(I) chain) | GPQGIAGQ (SEQ ID NO: 625) |
| Calf skin collagen (α2(I) chain) | GPQGLLGA (SEQ ID NO: 626) |
| Bovine cartilage collagen (α1(II) chain) | GIAGQ (SEQ ID NO: 627) |
| Human liver collagen (α1(III) chain) | GPLGIAGI (SEQ ID NO: 628) |
| Human α₂M | GPEGLRVG (SEQ ID NO: 629) |
| Human PZP | YGAGLGVV (SEQ ID NO: 630) |
| | AGLGVVER (SEQ ID NO: 631) |
| | AGLGISSI (SEQ ID NO: 632) |
| Rat α₁M | EPQALAMS (SEQ ID NO: 633) |
| | QALAMSAI (SEQ ID NO: 634) |
| Rat α₂M | AAYHLVSQ (SEQ ID NO: 635) |
| | MDAFLESS (SEQ ID NO: 636) |
| Rat α₁I₃(2J) | ESLPVVAV (SEQ ID NO: 637) |
| Rat α₁I₃(27J) | SAPAVESE (SEQ ID NO: 638) |
| Human fibroblast collagenase | DVAQFVLT (SEQ ID NO: 639) |
| (autolytic cleavages) | VAQFVLTE (SEQ ID NO: 640) |
| | AQFVLTEG (SEQ ID NO: 641) |
| | PVQPIGPQ (SEQ ID NO: 642) |

[0381] In addition, agents can be attached via disulfide bonds (for example, the disulfide bonds on a cysteine molecule) to the AB. Since many tumors naturally release high levels of glutathione (a reducing agent) this can reduce the disulfide bonds with subsequent release of the agent at the site of delivery. In some embodiments, the reducing agent that would modify a CM would also modify the linker of the conjugated activatable antibody.

[0382] Spacers and Cleavable Elements:

[0383] In some embodiments, it may be necessary to construct the linker in such a way as to optimize the spacing between the agent and the AB of the activatable antibody. This can be accomplished by use of a linker of the general structure:

W—(CH₂)n-Q

wherein
W is either —NH—CH₂— or —CH₂—;
Q is an amino acid, peptide; and
n is an integer from 0 to 20.

[0384] In some embodiments, the linker may comprise a spacer element and a cleavable element. The spacer element serves to position the cleavable element away from the core of the AB such that the cleavable element is more accessible to the enzyme responsible for cleavage. Certain of the branched linkers described above may serve as spacer elements.

[0385] Throughout this discussion, it should be understood that the attachment of linker to agent (or of spacer element to cleavable element, or cleavable element to agent) need not be particular mode of attachment or reaction. Any reaction providing a product of suitable stability and biological compatibility is acceptable.

[0386] Serum Complement and Selection of Linkers:

[0387] According to one method of the present disclosure, when release of an agent is desired, an AB that is an antibody of a class that can activate complement is used. The resulting conjugate retains both the ability to bind antigen and activate the complement cascade. Thus, according to this embodiment of the present disclosure, an agent is joined to one end of the cleavable linker or cleavable element and the other end of the linker group is attached to a specific site on the AB. For example, if the agent has a hydroxy group or an amino group, it can be attached to the carboxy terminus of a peptide, amino acid or other suitably chosen linker via an ester or amide bond, respectively. For example, such agents can be attached to the linker peptide via a carbodimide reaction. If the agent contains functional groups that would interfere with attachment to the linker, these interfering functional groups can be blocked before attachment and deblocked once the product conjugate or intermediate is made. The opposite or amino terminus of the linker is then used either directly or after further modification for binding to an AB that is capable of activating complement.

[0388] Linkers (or spacer elements of linkers) can be of any desired length, one end of which can be covalently attached to specific sites on the AB of the activatable antibody. The other end of the linker or spacer element can be attached to an amino acid or peptide linker.

[0389] Thus when these conjugates bind to antigen in the presence of complement the amide or ester bond that attaches the agent to the linker will be cleaved, resulting in release of the agent in its active form. These conjugates, when administered to a subject, will accomplish delivery and release of the agent at the target site, and are particularly effective for the in vivo delivery of pharmaceutical agents, antibiotics, antimetabolites, antiproliferative agents and the like as presented in but not limited to those in Table 6.

[0390] Linkers for Release without Complement Activation:

[0391] In yet another application of targeted delivery, release of the agent without complement activation is desired since activation of the complement cascade will ultimately lyse the target cell. Hence, this approach is useful when delivery and release of the agent should be accomplished without killing the target cell. Such is the goal when delivery of cell mediators such as hormones, enzymes, corticosteroids, neurotransmitters, genes or enzymes to target cells is desired. These conjugates can be prepared by attaching the agent to an AB that is not capable of activating complement via a linker that is mildly susceptible to cleavage by serum proteases. When this conjugate is administered to an individual, antigen-antibody complexes will form quickly whereas cleavage of the agent will occur slowly, thus resulting in release of the compound at the target site.

[0392] Biochemical Cross Linkers:

[0393] In some embodiments, the activatable antibody can be conjugated to one or more therapeutic agents using certain biochemical cross-linkers. Cross-linking reagents form molecular bridges that tie together functional groups of two different molecules. To link two different proteins in a step-wise manner, hetero-bifunctional cross-linkers can be used that eliminate unwanted homopolymer formation.

[0394] Peptidyl linkers cleavable by lysosomal proteases are also useful, for example, Val-Cit, Val-Ala or other dipeptides. In addition, acid-labile linkers cleavable in the low-pH environment of the lysosome can be used, for example: bis-sialyl ether. Other suitable linkers include cathepsin-labile substrates, particularly those that show optimal function at an acidic pH.

[0395] Exemplary hetero-bifunctional cross-linkers are referenced in Table 8.

TABLE 8
Exemplary Hetero-Bifunctional Cross Linkers
HETERO-BIFUNCTIONAL CROSS-LINKERS

| | | | Spacer Arm |
|---|---|---|---|
| | | | Length after |
| | Reactive | Advantages | cross-linking |
| Linker | Toward | and Applications | (Angstroms) |
| SMPT | Primary amines | Greater stability | 11.2 Å |
| | Sulfhydryls | | |
| SPDP | Primary amines | Thiolation | 6.8 Å |
| | Sulfhydryls | Cleavable cross-linking | |
| LC-SPDP | Primary amines | Extended spacer arm | 15.6 Å |
| | Sulfhydryls | | |
| Sulfo-LC- | Primary amines | Extender spacer arm | 15.6 Å |
| SPDP | Sulfhydryls | Water-soluble | |
| SMCC | Primary amines | Stable maleimide | 11.6 Å |
| | | reactive group | |
| | Sulfhydryls | Enzyme-antibody | |
| | | conjugation | |
| | | Hapten-carrier protein | |
| | | conjugation | |
| Sulfo- | Primary amines | Stable maleimide | 11.6 Å |
| SMCC | | reactive group | |
| | Sulfhydryls | Water-soluble | |
| | | Enzyme-antibody | |
| | | conjugation | |
| MBS | Primary amines | Enzyme-antibody | 9.9 Å |
| | | conjugation | |
| | Sulfhydryls | Hapten-carrier protein | |
| | | conjugation | |
| Sulfo-MBS | Primary amines | Water-soluble | 9.9 Å |
| | Sulfhydryls | | |
| SIAB | Primary amines | Enzyme-antibody | 10.6 Å |
| | Sulfhydryls | conjugation | |
| Sulfo- | Primary amines | Water-soluble | 10.6 Å |
| SIAB | Sulfhydryls | | |
| SMPB | Primary amines | Extended spacer arm | 14.5 Å |
| | Sulfhydryls | Enzyme-antibody | |
| | | conjugation | |
| Sulfo- | Primary amines | Extended spacer arm | 14.5 Å |
| SMPB | Sulfhydryls | Water-soluble | |
| EDE/Sulfo- | Primary amines | Hapten-Carrier | 0 |
| NHS | Carboxyl groups | conjugation | |
| ABH | Carbohydrates | Reacts with sugar | 11.9 Å |
| | Nonselective | groups | |

[0396] Non-Cleavable Linkers or Direct Attachment:

[0397] In some embodiments of the disclosure, the conjugate can be designed so that the agent is delivered to the target but not released. This can be accomplished by attaching an agent to an AB either directly or via a non-cleavable linker.

[0398] These non-cleavable linkers may include amino acids, peptides, D-amino acids or other organic compounds that can be modified to include functional groups that can subsequently be utilized in attachment to ABs by the methods described herein. A-general formula for such an organic linker could be

W—(CH₂)n-Q

wherein
W is either —NH—CH₂— or —CH₂—;
Q is an amino acid, peptide; and
n is an integer from 0 to 20.

[0399] Non-Cleavable Conjugates:

[0400] In some embodiments, a compound can be attached to ABs that do not activate complement. When using ABs that are incapable of complement activation, this attachment can be accomplished using linkers that are susceptible to cleavage by activated complement or using linkers that are not susceptible to cleavage by activated complement.

[0401] The antibodies disclosed herein can also be formulated as immunoliposomes. Liposomes containing the antibody are prepared by methods known in the art, such as described in Epstein et al., Proc. Natl. Acad. Sci. USA, 82: 3688 (1985); Hwang et al., Proc. Natl Acad. Sci. USA, 77: 4030 (1980); and U.S. Pat. Nos. 4,485,045 and 4,544,545. Liposomes with enhanced circulation time are disclosed in U.S. Pat. No. 5,013,556.

[0402] Particularly useful liposomes can be generated by the reverse-phase evaporation method with a lipid composition comprising phosphatidylcholine, cholesterol, and PEG-derivatized phosphatidylethanolamine (PEG-PE). Liposomes are extruded through filters of defined pore size to yield liposomes with the desired diameter. Fab′ fragments of the antibody of the present disclosure can be conjugated to the liposomes as described in Martin et al., J. Biol. Chem., 257: 286-288 (1982) via a disulfide-interchange reaction.

[0403] CD147 Antibody Drug Conjugates and CD147 Activatable Antibody Drug Conjugates

[0404] In some embodiments, the antibody drug conjugates (ADCs) and activatable antibody drug conjugates (AADCs) can include one or more polypeptides that include the combination of a light chain sequence or a light chain variable domain sequence, and a heavy chain sequence or a heavy chain variable domain sequence, a linker, and a toxin in a given row of Table 9 or any combination of a light chain sequence or a light chain variable domain sequence, and a heavy chain sequence or a heavy chain variable domain sequence, a linker, and a toxin of Table 9. For example, Combination No. 1 comprises the heavy chain of SEQ ID No. 1, the light chain of SEQ ID No. 5, a vc linker, conjugated to MMAD toxin.

TABLE 9
CD147 ADC and CD147 Activatable ADC Combinations

| | Heavy Chain (HC) | Light Chain (LC) | | |
|---|---|---|---|---|
| | or HC Variable | or LC Variable | | |
| Comb. | Region | Region | | |
| No. | SEQ ID NO. | SEQ ID NO. | Linker | Toxin |
| 1 | 1 | 5 | vc | MMAD |
| 2 | 1 | 5 | PEG2-vc | MMAD |
| 3 | 1 | 5 | vc | MMAE |
| 4 | 1 | 5 | vc | duocarmycin |
| 5 | 1 | 5 | spdb | DM4 |
| 6 | 19 | 23 | vc | MMAD |
| 7 | 19 | 23 | PEG2-vc | MMAD |
| 8 | 19 | 23 | vc | MMAE |
| 9 | 19 | 23 | vc | duocarmycin |
| 10 | 19 | 23 | spdb | DM4 |
| 11 | 1 | 172 | vc | MMAD |
| 12 | 1 | 172 | PEG2-vc | MMAD |
| 13 | 1 | 172 | vc | MMAE |
| 14 | 1 | 172 | vc | duocarmycin |
| 15 | 1 | 172 | spdb | DM4 |
| 16 | 19 | 262 | vc | MMAD |
| 17 | 19 | 262 | PEG2-vc | MMAD |
| 18 | 19 | 262 | vc | MMAE |
| 19 | 19 | 262 | vc | duocarmycin |
| 20 | 19 | 262 | spdb | DM4 |
| 21 | 1 | 173 | vc | MMAD |
| 22 | 1 | 173 | PEG2-vc | MMAD |
| 23 | 1 | 173 | vc | MMAE |
| 24 | 1 | 173 | vc | duocarmycin |
| 25 | 1 | 173 | spdb | DM4 |
| 26 | 19 | 263 | vc | MMAD |
| 27 | 19 | 263 | PEG2-vc | MMAD |
| 28 | 19 | 263 | vc | MMAE |
| 29 | 19 | 263 | vc | duocarmycin |
| 30 | 19 | 263 | spdb | DM4 |
| 31 | 1 | 178 | vc | MMAD |
| 32 | 1 | 178 | PEG2-vc | MMAD |
| 33 | 1 | 178 | vc | MMAE |
| 34 | 1 | 178 | vc | duocarmycin |
| 35 | 1 | 178 | spdb | DM4 |
| 36 | 19 | 268 | vc | MMAD |
| 37 | 19 | 268 | PEG2-vc | MMAD |
| 38 | 19 | 268 | vc | MMAE |
| 39 | 19 | 268 | vc | duocarmycin |
| 40 | 19 | 268 | spdb | DM4 |
| 41 | 1 | 179 | vc | MMAD |
| 42 | 1 | 179 | PEG2-vc | MMAD |
| 43 | 1 | 179 | vc | MMAE |
| 44 | 1 | 179 | vc | duocarmycin |
| 45 | 1 | 179 | spdb | DM4 |
| 46 | 19 | 269 | vc | MMAD |
| 47 | 19 | 269 | PEG2-vc | MMAD |
| 48 | 19 | 269 | vc | MMAE |
| 49 | 19 | 269 | vc | duocarmycin |
| 50 | 19 | 269 | spdb | DM4 |
| 51 | 1 | 180 | vc | MMAD |
| 52 | 1 | 180 | PEG2-vc | MMAD |
| 53 | 1 | 180 | vc | MMAE |
| 54 | 1 | 180 | vc | duocarmycin |
| 55 | 1 | 180 | spdb | DM4 |
| 56 | 19 | 270 | vc | MMAD |
| 57 | 19 | 270 | PEG2-vc | MMAD |
| 58 | 19 | 270 | vc | MMAE |
| 59 | 19 | 270 | vc | duocarmycin |
| 60 | 19 | 270 | spdb | D44 |
| 61 | 1 | 171 | vc | MMAD |
| 62 | 1 | 171 | PEG2-vc | MMAD |
| 63 | 1 | 171 | vc | MMAE |
| 64 | 1 | 171 | vc | duocarmycin |
| 65 | 1 | 171 | spdb | DM4 |
| 66 | 19 | 261 | vc | MMAD |
| 67 | 19 | 261 | PEG2-vc | MMAD |
| 68 | 19 | 261 | vc | MMAE |
| 69 | 19 | 261 | vc | duocarmycin |
| 70 | 19 | 261 | spdb | DM4 |
| 71 | 1 | 163 | vc | MMAD |
| 72 | 1 | 163 | PEG2-vc | MMAD |
| 73 | 1 | 163 | vc | MMAE |
| 74 | 1 | 163 | vc | duocarmycin |
| 75 | 1 | 163 | spdb | DM4 |
| 76 | 19 | 253 | vc | MMAD |
| 77 | 19 | 253 | PEG2-vc | MMAD |
| 78 | 19 | 253 | vc | MMAE |
| 79 | 19 | 253 | vc | duocarmycin |
| 80 | 19 | 253 | spdb | DM4 |
| 81 | 1 | 164 | vc | MMAD |
| 82 | 1 | 164 | PEG2-vc | MMAD |
| 83 | 1 | 164 | vc | MMAE |
| 84 | 1 | 164 | vc | duocarmycin |
| 85 | 1 | 164 | spdb | DM4 |
| 86 | 19 | 254 | vc | MMAD |
| 87 | 19 | 254 | PEG2-vc | MMAD |
| 88 | 19 | 254 | vc | MMAE |
| 89 | 19 | 254 | vc | duocarmycin |
| 90 | 19 | 254 | spdb | DM4 |
| 91 | 1 | 165 | vc | MMAD |
| 92 | 1 | 165 | PEG2-vc | MMAD |
| 93 | 1 | 165 | vc | MMAE |
| 94 | 1 | 165 | vc | duocarmycin |
| 95 | 1 | 165 | spdb | DM4 |
| 96 | 19 | 255 | vc | MMAD |
| 97 | 19 | 255 | PEG2-vc | MMAD |
| 98 | 19 | 255 | vc | MMAE |
| 99 | 19 | 255 | vc | duocarmycin |
| 100 | 19 | 255 | spdb | DM4 |
| 101 | 1 | 166 | vc | MMAD |
| 102 | 1 | 166 | PEG2-vc | MMAD |
| 103 | 1 | 166 | vc | MMAE |
| 104 | 1 | 166 | vc | duocarmycin |
| 105 | 1 | 166 | spdb | DM4 |
| 106 | 19 | 256 | vc | MMAD |
| 107 | 19 | 256 | PEG2-vc | MMAD |
| 108 | 19 | 256 | vc | MMAE |
| 109 | 19 | 256 | vc | duocarmycin |
| 110 | 19 | 256 | spdb | DM4 |
| 111 | 1 | 167 | vc | MMAD |
| 112 | 1 | 167 | PEG2-vc | MMAD |
| 113 | 1 | 167 | vc | MMAE |
| 114 | 1 | 167 | vc | duocarmycin |
| 115 | 1 | 167 | spdb | DM4 |
| 116 | 19 | 257 | vc | MMAD |
| 117 | 19 | 257 | PEG2-vc | MMAD |
| 118 | 19 | 257 | vc | MMAE |
| 119 | 19 | 257 | vc | duocarmycin |
| 120 | 19 | 257 | spdb | DM4 |
| 121 | 1 | 168 | vc | MMAD |
| 122 | 1 | 168 | PEG2-vc | MMAD |
| 123 | 1 | 168 | vc | MMAE |
| 124 | 1 | 168 | vc | duocarmycin |
| 125 | 1 | 168 | spdb | DM4 |
| 126 | 19 | 258 | vc | MMAD |
| 127 | 19 | 258 | PEG2-vc | MMAD |
| 128 | 19 | 258 | vc | MMAE |
| 129 | 19 | 258 | vc | duocarmycin |
| 130 | 19 | 258 | spdb | DM4 |
| 131 | 1 | 169 | vc | MMAD |
| 132 | 1 | 169 | PEG2-vc | MMAD |
| 133 | 1 | 169 | vc | MMAE |
| 134 | 1 | 169 | vc | duocarmycin |
| 135 | 1 | 169 | spdb | DM4 |
| 136 | 19 | 259 | vc | MMAD |
| 137 | 19 | 259 | PEG2-vc | MMAD |
| 138 | 19 | 259 | vc | MMAE |
| 139 | 19 | 259 | vc | duocarmycin |
| 140 | 19 | 259 | spdb | DM4 |
| 141 | 1 | 170 | vc | MMAD |
| 142 | 1 | 170 | PEG2-vc | MMAD |
| 143 | 1 | 170 | vc | MMAE |
| 144 | 1 | 170 | vc | duocarmycin |
| 145 | 1 | 170 | spdb | DM4 |
| 146 | 19 | 160 | vc | MMAD |
| 147 | 19 | 160 | PEG2-vc | MMAD |
| 148 | 19 | 160 | vc | MMAE |
| 149 | 19 | 160 | vc | duocarmycin |
| 150 | 19 | 160 | spdb | DM4 |
| 151 | 1 | 157 | vc | MMAD |
| 152 | 1 | 157 | PEG2-vc | MMAD |
| 153 | 1 | 157 | vc | MMAE |
| 154 | 1 | 157 | vc | duocarmycin |
| 155 | 1 | 157 | spdb | DM4 |
| 156 | 19 | 247 | vc | MMAD |
| 157 | 19 | 247 | PEG2-vc | MMAD |
| 158 | 19 | 247 | vc | MMAE |
| 159 | 19 | 247 | vc | duocarmycin |
| 160 | 19 | 247 | spdb | DM4 |
| 161 | 1 | 158 | vc | MMAD |
| 162 | 1 | 158 | PEG2-vc | MMAD |
| 163 | 1 | 158 | vc | MMAE |
| 164 | 1 | 158 | vc | duocarmycin |
| 165 | 1 | 158 | spdb | DM4 |
| 166 | 19 | 248 | vc | MMAD |
| 167 | 19 | 248 | PEG2-vc | MMAD |
| 168 | 19 | 248 | vc | MMAE |
| 169 | 19 | 248 | vc | duocarmycin |
| 170 | 19 | 248 | spdb | DM4 |
| 171 | 1 | 159 | vc | MMAD |
| 172 | 1 | 159 | PEG2-vc | MMAD |
| 173 | 1 | 159 | vc | MMAE |
| 174 | 1 | 159 | vc | duocarmycin |
| 175 | 1 | 159 | spdb | DM4 |
| 176 | 19 | 249 | vc | MMAD |
| 177 | 19 | 249 | PEG2-vc | MMAD |
| 178 | 19 | 249 | vc | MMAE |
| 179 | 19 | 249 | vc | duocarmycin |
| 180 | 19 | 249 | spdb | DM4 |
| 181 | 1 | 160 | vc | MMAD |
| 182 | 1 | 160 | PEG2-vc | MMAD |
| 183 | 1 | 160 | vc | MMAE |
| 184 | 1 | 160 | vc | duocarmycin |
| 185 | 1 | 160 | spdb | DM4 |
| 186 | 19 | 250 | vc | MMAD |
| 187 | 19 | 250 | PEG2-vc | MMAD |
| 188 | 19 | 250 | vc | MMAE |
| 189 | 19 | 250 | vc | duocarmycin |
| 190 | 19 | 250 | spdb | DM4 |
| 191 | 1 | 161 | vc | MMAD |
| 192 | 1 | 161 | PEG2-vc | MMAD |
| 193 | 1 | 161 | vc | MMAE |
| 194 | 1 | 161 | vc | duocarmycin |
| 195 | 1 | 161 | spdb | DM4 |
| 196 | 19 | 251 | vc | MMAD |
| 197 | 19 | 251 | PEG2-vc | MMAD |
| 198 | 19 | 251 | vc | MMAE |
| 199 | 19 | 251 | vr | duocarmycin |
| 200 | 19 | 251 | spdb | DM4 |
| 201 | 1 | 162 | vc | MMAD |
| 202 | 1 | 162 | PEG2-vc | MMAD |
| 203 | 1 | 162 | vc | MMAE |
| 204 | 1 | 162 | vc | duocarmycin |
| 205 | 1 | 162 | spdb | DM4 |
| 206 | 19 | 252 | vc | MMAD |
| 207 | 19 | 252 | PEG2-vc | MMAD |
| 208 | 19 | 252 | vc | MMAE |
| 209 | 19 | 252 | vc | duocarmycin |
| 210 | 19 | 252 | spdb | DM4 |

[0405] An antibody drug conjugate (ADC) of the present disclosure or activatable antibody drug conjugate (AADC) of the present disclosure may include one or more polypeptides that include the combination of amino acid sequences, a linker, and a toxin listed in a given row of Table 9. Therefore, an activatable antibody drug conjugate (ADC) of the present disclosure or activatable antibody drug conjugate (AADC) of the present disclosure that includes the combination of amino acid sequences, a linker, and a toxin listed in a given row or provided as a specific combination is described herein. For example, an activatable antibody drug conjugate of the present disclosure may include the amino acid sequences of combination no. 20, which includes a heavy chain comprising the amino acid sequence of SEQ ID NO: 19, a light chain comprising the amino acid sequence of SEQ ID NO: 262, and a spdb-DM4 linker-toxin. In another example of the AADCs disclosed and described herein, an activatable antibody drug conjugate of the present disclosure may include the amino acid sequences of combination no. 70, which includes a heavy chain comprising the amino acid sequence of SEQ ID NO: 19, a light chain comprising the amino acid sequence of SEQ ID NO: 261, and a spdb-DM4 linker-toxin.

[0406] Any of the combinations in Table 9 that list a heavy chain and light chain variable region can be combined with human immunoglobulin constant regions to result in fully human IgGs including IgG1, IgG2, IgG4 or mutated constant regions to result in human IgGs with altered functions such as IgG N297A, IgG1 N297Q, or IgG4 S228P. The combinations described in Table 9 are not limited by the particular combinations shown in any given row, and thus can include any heavy chain sequence or heavy chain variable region sequence from column 2 of Table 9 combined with any light chain sequence or light chain variable region sequence from column 3 of Table 9 combined with any linker from column 4 combined with any toxin from column 5. In addition to the heavy chain sequences or heavy chain variable region sequences listed in column 2, any heavy chain sequence or heavy chain variable region sequence disclosed herein can be used in a combination. In addition to the light chain sequences or light chain variable region sequences listed in column 3, any light chain sequence or light chain variable region sequence disclosed herein can be used in a combination. In addition to the linkers listed in column 4, any linker disclosed herein can be used in a combination. In addition to the toxins listed in column 5, any toxin disclosed herein can be used in a combination.

[0407] Multispecific Antibodies and Activatable Antibodies

[0408] In some embodiments, the activatable CD147 antibody and/or conjugated activatable CD147 antibody is monospecific. In some embodiments, the activatable CD147 antibody and/or conjugated activatable CD147 antibody is multispecific, e.g., by way of non-limiting example, bispecific or trifunctional.

[0409] In some embodiments, the activatable CD147 antibody and/or conjugated activatable CD147 antibody is formulated as part of a pro-Bispecific T Cell Engager (BITE) molecule. In some embodiments, the activatable CD147 antibody and/or conjugated activatable CD147 antibody is formulated as part of a pro-Chimeric Antigen Receptor (CAR) modified T cell or other engineered receptor.

[0410] The disclosure accordingly also provides multispecific CD147 antibodies. The multispecific antibodies provided herein are multispecific antibodies that recognize CD147 and at least one or more different antigens or epitopes.

[0411] The disclosure also provides multispecific CD147 activatable antibodies. The multispecific activatable antibodies provided herein are multispecific antibodies that recognize CD147 and at least one or more different antigens or epitopes and that include at least one masking moiety (MM) linked to at least one antigen- or epitope-binding domain of the multispecific antibody such that coupling of the MM reduces the ability of the antigen- or epitope-binding domain to bind its target. In some embodiments, the MM is coupled to the antigen- or epitope-binding domain of the multispecific antibody via a cleavable moiety (CM) that functions as a substrate for at least one protease. The activatable multispecific antibodies provided herein are stable in circulation, activated at intended sites of therapy and/or diagnosis but not in normal, i.e., healthy tissue, and, when activated, exhibit binding to a target that is at least comparable to the corresponding, unmodified multispecific antibody.

[0412] In some embodiments, the activatable antibody or antigen-binding fragment thereof is incorporated in a multispecific activatable antibody or antigen-binding fragment thereof, where at least one arm of the multispecific activatable antibody specifically binds CD147. In some embodiments, the activatable antibody or antigen-binding fragment thereof is incorporated in a bispecific antibody or antigen-binding fragment thereof, where at least one arm of the bispecific activatable antibody specifically binds CD147.

[0413] In some embodiments, the antibody or antigen-binding fragment thereof is incorporated in a multispecific antibody or antigen-binding fragment thereof, where at least one arm of the multispecific antibody or antigen-binding fragment thereof specifically binds CD147. In some embodiments, the antibody or antigen-binding fragment thereof is incorporated in a bispecific antibody or antigen-binding fragment thereof, where at least one arm of the bispecific antibody or antigen-binding fragment thereof specifically binds CD147.

[0414] In some embodiments, at least one arm of the multispecific antibody or antigen-binding fragment thereof, e.g., a bispecific antibody or antigen-binding fragment thereof, comprises a heavy chain variable region amino acid sequence selected from the group consisting of SEQ ID NOs: 1-4. In some embodiments, at least one arm of the multispecific antibody or antigen-binding fragment thereof, e.g., a bispecific antibody or antigen-binding fragment thereof, comprises a heavy chain variable region amino acid sequence selected from the group consisting of SEQ ID NOs: 1-3.

[0415] In some embodiments, at least one arm of the multispecific antibody or antigen-binding fragment thereof, e.g., a bispecific antibody or antigen-binding fragment thereof, comprises a light chain variable region amino acid sequence selected from the group consisting of SEQ ID NOs: 5-9. In some embodiments, at least one arm of the multispecific antibody or antigen-binding fragment thereof, e.g., a bispecific antibody or antigen-binding fragment thereof, comprises a light chain variable region amino acid sequence selected from the group consisting of SEQ ID NOs: 5-8.

[0416] In some embodiments, at least one arm of the multispecific antibody or antigen-binding fragment thereof, e.g., a bispecific antibody or antigen-binding fragment thereof, comprises a heavy chain variable region amino acid sequence selected from the group consisting of SEQ ID NOs: 1-4, and a light chain variable region amino acid sequence selected from the group consisting of SEQ ID NOs: 5-9.

[0417] In some embodiments, at least one arm of the multispecific antibody or antigen-binding fragment thereof, e.g., a bispecific antibody or antigen-binding fragment thereof, comprises a heavy chain variable region amino acid sequence c selected from the group consisting of SEQ ID NOs: 1-3, and a light chain variable region amino acid sequence selected from the group consisting of SEQ ID NOs: 5-8.

[0418] In some embodiments, at least one arm of the multispecific antibody or antigen-binding fragment thereof, e.g., a bispecific antibody or antigen-binding fragment thereof, comprises a heavy chain variable region amino acid sequence that is at least 90%, 91%, 92%, 93%, 94%, 95%, 96%, 97%, 98% or 99% identical to an amino acid sequence selected from the group consisting of SEQ ID NOs: 1-4. In some embodiments, at least one arm of the multispecific antibody or antigen-binding fragment thereof, e.g., a bispecific antibody or antigen-binding fragment thereof, comprises a heavy chain variable region amino acid sequence that is at least 90%, 91%, 92%, 93%, 94%, 95%, 96%, 97%, 98% or 99% identical to an amino acid sequence selected from the group consisting of SEQ ID NOs: 1-3.

[0419] In some embodiments, at least one arm of the multispecific antibody or antigen-binding fragment thereof, e.g., a bispecific antibody or antigen-binding fragment thereof, comprises a light chain variable region amino acid sequence that is at least 90%, 91%, 92%, 93%, 94%, 95%, 96%, 97%, 98% or 99% identical to an amino acid sequence selected from the group consisting of SEQ ID NOs: 5-9. In some embodiments, at least one arm of the multispecific antibody or antigen-binding fragment thereof, e.g., a bispecific antibody or antigen-binding fragment thereof, comprises a light chain variable region amino acid sequence that is at least 90%, 91%, 92%, 93%, 94%, 95%, 96%, 97%, 98% or 99% identical to an amino acid sequence selected from the group consisting of SEQ ID NOs: 5-8.

[0420] In some embodiments, at least one arm of the multispecific antibody or antigen-binding fragment thereof, e.g., a bispecific antibody or antigen-binding fragment thereof, comprises a heavy chain variable region amino acid sequence that is at least 90%, 91%, 92%, 93%, 94%, 95%, 96%, 97%, 98% or 99% identical to an amino acid sequence selected from the group consisting of SEQ ID NOs: 1-4, and a light chain variable region amino acid sequence that is at least 90%, 91%, 92%, 93%, 94%, 95%, 96%, 97%, 98% or 99% identical to an amino acid sequence selected from the group consisting of SEQ ID NOs: 5-9.

[0421] In some embodiments, at least one arm of the multispecific antibody or antigen-binding fragment thereof, e.g., a bispecific antibody or antigen-binding fragment thereof, comprises a heavy chain variable region amino acid sequence that is at least 90%, 91%, 92%, 93%, 94%, 95%, 96%, 97%, 98% or 99% identical to an amino acid sequence selected from the group consisting of SEQ ID NOs: 1-3, and a light chain variable region amino acid sequence that is at least 90%, 91%, 92/%, 93%, 94%, 95%, 96%, 97%, 98% or 99% identical to an amino acid sequence selected from the group consisting of SEQ ID NOs: 5-8.

[0422] In some embodiments, at least one arm of the multispecific antibody or antigen-binding fragment thereof, e.g., a bispecific antibody or antigen-binding fragment thereof, comprises a combination of a variable heavy chain complementarity determining region 1 (VH CDR1, also referred to herein as CDRH1) sequence, a variable heavy chain complementarity determining region 2 (VH CDR2, also referred to herein as CDRH2) sequence, a variable heavy chain complementarity determining region 3 (VH CDR3, also referred to herein as CDRH3) sequence, a variable light chain complementarity determining region 1 (VL CDR1, also referred to herein as CDRL1) sequence, a variable light chain complementarity determining region 2 (VL CDR2, also referred to herein as CDRL2) sequence, and a variable light chain complementarity determining region 3 (VL CDR3, also referred to herein as CDRL3) sequence, wherein at least one complementarity determining region (CDR) sequence is selected from the group consisting of a VH CDR1 sequence comprising the amino acid sequence GFTFSNYWMN (SEQ ID NO: 10) or GFTFSNYWMD (SEQ ID NO: 11); a VH CDR2 sequence comprising the amino acid sequence EIRLKSYNYATH (SEQ ID NO: 12); a VH CDR3 sequence comprising the amino acid sequence AGTDY (SEQ ID NO: 13); a VL CDR1 sequence comprising the amino acid sequence KASQSVRTDVA (SEQ ID NO: 14) or RASQSVRTDVG (SEQ ID NO: 15); a VL CDR2 sequence comprising the amino acid sequence YSSNRYT (SEQ ID NO: 16); and a VL CDR3 sequence comprising the amino acid sequence QQDYSSPFT (SEQ ID NO: 17) or QQDYSSPYT (SEQ ID NO: 18).

[0423] In some embodiments, at least one arm of the multispecific antibody or antigen-binding fragment thereof, e.g., a bispecific antibody or antigen-binding fragment thereof, comprises a combination of a VH CDR1 sequence, a VH CDR2 sequence, a VH CDR3 sequence, a VL CDR1 sequence, a VL CDR2 sequence, and a VL CDR3 sequence, wherein at least one CDR sequence is selected from the group consisting of a VH CDR1 sequence that includes a sequence that is at least 90%, 91%, 92%, 93%, 94%, 95%, 96%, 97%, 98%, 99% or more identical to a VH CDR1 sequence comprising the amino acid sequence GFTFSNYWMN (SEQ ID NO: 10) or GFTFSNYWMD (SEQ ID NO: 11); a VH CDR2 sequence that includes a sequence that is at least 90%, 91%, 92%, 93%, 94%, 95%, 96%, 97%, 98%, 99%, or more identical to a VH CDR2 sequence comprising the amino acid sequence EIRLKSYNYATH (SEQ ID NO: 12); a VH CDR3 sequence that includes a sequence that is at least 90%, 91%, 92%, 93%, 94%, 95%, 96%, 97%, 98%, 99% or more identical to a VH CDR3 sequence comprising the amino acid sequence AGTDY (SEQ ID NO: 13); a VL CDR1 sequence that includes a sequence that is at least 90%, 91%, 92%, 93%, 94%, 95%, 96%, 97%, 98%, 99% or more identical to a VL CDR1 sequence comprising the amino acid sequence ASSSVYYMY (SEQ ID NO: 12) or CRASSSVYYMY (SEQ ID NO: 13); a VL CDR2 sequence that includes a sequence that is at least 90%, 91%, 92%, 93%, 94%, 95%, 96%, 97%, 98%, 99% or more identical to a VL CDR2 sequence comprising the amino acid sequence YSSNRYT (SEQ ID NO: 16; and a VL CDR3 sequence that includes a sequence that is at least 90%, 91%, 92%, 93%, 94%, 95%, 96%, 97%, 98%, 99% or more identical to a VL CDR3 sequence comprising the amino acid sequence QQDYSSPFT (SEQ ID NO: 17) or QQDYSSPYT (SEQ ID NO: 18).

[0424] In some embodiments, at least one arm of the multispecific antibody or antigen-binding fragment thereof, e.g., a bispecific antibody or antigen-binding fragment thereof, comprises a combination of a VH CDR1 sequence, a VH CDR2 sequence, a VH CDR3 sequence, a VL CDR1 sequence, a VL CDR2 sequence, and a VL CDR3 sequence, wherein the VH CDR1 sequence comprises the amino acid sequence GFTFSNYWMN (SEQ ID NO: 10) or GFTFSNYWMD (SEQ ID NO: 11); the VH CDR2 sequence comprises the amino acid sequence EIRLKSYNYATH (SEQ ID NO: 12); the VH CDR3 sequence comprises the amino acid sequence AGTDY (SEQ ID NO: 13); the VL CDR1 sequence comprises the amino acid sequence KASQSVRTDVA (SEQ ID NO: 14) or RASQSVRTDVG (SEQ ID NO: 15); the VL CDR2 sequence comprises the amino acid sequence YSSNRYT (SEQ ID NO: 16); and the VL CDR3 sequence comprises the amino acid sequence QQDYSSPFT (SEQ ID NO: 17) or QQDYSSPYT (SEQ ID NO: 18).

[0425] In some embodiments, at least one arm of the multispecific antibody or antigen-binding fragment thereof, e.g., a bispecific antibody or antigen-binding fragment thereof, comprises a combination of a VH CDR1 sequence, a VH CDR2 sequence, a VH CDR3 sequence, a VL CDR1 sequence, a VL CDR2 sequence, and a VL CDR3 sequence, wherein the VH CDR1 sequence comprises a sequence that is at least 90%, 91%, 92%, 93%, 94%, 95%, 96%, 97%, 98%, 99% or more identical to the amino acid sequence GFTFSNYWMN (SEQ ID NO: 10) or GFTFSNYWMD (SEQ ID NO: 11); the VH CDR2 sequence comprises a sequence that is at least 90%, 91%, 92%, 93%, 94%, 95%, 96%, 97%, 98%, 99% or more identical to the amino acid sequence EIRLKSYNYATH (SEQ ID NO: 12); the VH CDR3 sequence comprises a sequence that is at least 90%, 91%, 92%, 93%, 94%, 95%, 96%, 97%, 98%, 99% or more identical to the amino acid sequence AGTDY (SEQ ID NO: 13); the VL CDR1 sequence comprises a sequence that is at least 90%, 91%, 92%, 93%, 94%, 95%, 96%, 97%, 98%, 99% or more identical to the amino acid sequence KASQSVRTDVA (SEQ ID NO: 14) or RASQSVRTDVG (SEQ ID NO: 15); the VL CDR2 sequence comprises a sequence that is at least 90%, 91%, 92%, 93%, 94%, 95%, 96%, 97%, 98%, 99% or more identical to the amino acid sequence YSSNRYT (SEQ ID NO: 16); and the VL CDR3 sequence comprises a sequence that is at least 90%, 91%, 92%, 93%, 94%, 95%, 96%, 97%, 98%, 99% or more identical to the amino acid sequence QQDYSSPFT (SEQ ID NO: 17) or QQDYSSPYT (SEQ ID NO: 18).

[0426] In some embodiments, at least one arm of the multispecific antibody or antigen-binding fragment thereof, e.g., a bispecific antibody or antigen-binding fragment thereof, comprises a heavy chain or a heavy chain variable region that comprises or is derived from a heavy chain amino acid sequence or heavy chain variable region amino acid sequence shown in Table 1. In some embodiments, at least one arm of the multispecific antibody or antigen-binding fragment thereof, e.g., a bispecific antibody or antigen-binding fragment thereof, comprises a light chain or a light chain variable region that comprises or is derived from a light chain amino acid sequence or light chain variable region amino acid sequence shown in Table 1. In some embodiments, at least one arm of the multispecific antibody or antigen-binding fragment thereof, e.g., a bispecific antibody or antigen-binding fragment thereof, comprises a heavy chain or a heavy chain variable region amino acid sequence that comprises or is derived from a heavy chain amino acid sequence or heavy chain variable region amino acid sequence shown in Table 1 and a light chain or a light chain variable region amino acid sequence that comprises or is derived from a light chain amino acid sequence or light chain variable region amino acid sequence shown in Table 1.

[0427] In some embodiments, at least one arm of the multispecific antibody or antigen-binding fragment thereof, e.g., a bispecific antibody or antigen-binding fragment thereof, comprises a heavy chain variable region amino acid sequence that is at least 90%, 91%, 92%, 93%, 94%, 95%, 96%, 97%, 98% or 99% identical to an amino acid sequence selected from the group consisting of the heavy chain variable region sequences shown in Table 1. In some embodiments, at least one arm of the multispecific antibody or antigen-binding fragment thereof, e.g., a bispecific antibody or antigen-binding fragment thereof, comprises an amino acid sequence that is at least 90%, 91%, 92%, 93%, 94%, 95%, 96%, 97%, 98% or 99% identical to an amino acid sequence that is selected from the group consisting of the light chain variable region sequences shown in Table 1. In some embodiments, at least one arm of the multispecific antibody or antigen-binding fragment thereof, e.g., a bispecific antibody or antigen-binding fragment thereof, comprises an amino acid sequence that is at least 90%, 91%, 92%, 93%, 94%, 95%, 96%, 97%, 98% or 99%, identical to an amino acid sequence selected from the group consisting of the heavy chain variable region sequences shown in Table 1 and a light chain variable region amino acid sequence that is at least 90%, 91%, 92%, 93%, 94%, 95%, 96%, 97%, 98% or 99% identical to an amino acid sequence selected from the group consisting of the light chain variable region sequences shown in Table 1.

[0428] In some embodiments, at least one arm of the multispecific antibody or antigen-binding fragment thereof, e.g., a bispecific antibody or antigen-binding fragment thereof, comprises a combination of a variable heavy chain complementarity determining region 1 (VH CDR1, also referred to herein as CDRH1) sequence, a variable heavy chain complementarity determining region 2 (VH CDR2, also referred to herein as CDRH2) sequence, a variable heavy chain complementarity determining region 3 (VH CDR3, also referred to herein as CDRH3) sequence, a variable light chain complementarity determining region 1 (VL CDR1, also referred to herein as CDRL1) sequence, a variable light chain complementarity determining region 2 (VL CDR2, also referred to herein as CDRL2) sequence, and a variable light chain complementarity determining region 3 (VL CDR3, also referred to herein as CDRL3) sequence, wherein at least one CDR sequence is selected from the group consisting of a VH CDR1 sequence shown in Table 2; a VH CDR2 sequence shown in Table 2; a VH CDR3 sequence shown in Table 2; a VL CDR1 sequence shown in Table 2; a VL CDR2 sequence shown in Table 2; and a VL CDR3 sequence shown in Table 2.

[0429] In some embodiments, at least one arm of the multispecific antibody or antigen-binding fragment thereof, e.g., a bispecific antibody or antigen-binding fragment thereof, comprises a combination of a VH CDR1 sequence, a VH CDR2 sequence, a VH CDR3 sequence, a VL CDR1 sequence, a VL CDR2 sequence, and a VL CDR3 sequence, wherein at least one CDR sequence is selected from the group consisting of a VH CDR1 sequence that includes a sequence that is at least 90%, 91%, 92%, 93%, 94%, 95%, 96%, 97%, 98%, 99% or more identical to a VH CDR1 sequence shown in Table 2; a VH CD2 sequence that includes a sequence that is at least 90%, 91%, 92%, 93%, 94%, 95%, 96%, 97%, 98%, 99% or more identical to a VH CDR2 sequence shown in Table 2; a VH CDR3 sequence that includes a sequence that is at least 90%, 91%, 92%, 93%, 940%, 95%, 96%, 97%, 98%, 99% or more identical to a VH CDR3 sequence shown in Table 2; a VL CDR1 sequence that includes a sequence that is at least 90%, 91%, 92%, 93%, 94%, 95%, 96%, 97%, 98%, 99% or more identical to a VL CDR1 sequence shown in Table 2; a VL CDR2 sequence that includes a sequence that is at least 90%, 91%, 920%, 93%, 94%, 95%, 96%, 97%, 98/O, 99% or more identical to a VL CDR2 sequence shown in Table 2; and a VL CDR3 sequence that includes a sequence that is at least 90%, 91%, 92%, 93%, 94%, 95%, 96%, 97%, 98%, 99% or more identical to a VL CDR3 sequence shown in Table 2.

[0430] In some embodiments at least one arm of the multispecific antibody or antigen-binding fragment thereof, e.g., a bispecific antibody or antigen-binding fragment thereof, comprises a combination of a VH CDR1 sequence, a VH CDR2 sequence, a VH CDR3 sequence, a VL CDR1 sequence, a VL CDR2 sequence, and a VL CDR3 sequence, wherein the combination is a combination of the six CDR sequences (VH CDR1, VH CDR2, VH CDR3, VL CDR1, VL CDR2, and VL CDR3) shown in a single row in Table 2.

[0431] In some embodiments, at least one arm of the multispecific antibody or antigen-binding fragment thereof, e.g., a bispecific antibody or antigen-binding fragment thereof, comprises a light chain variable region that comprise a combination of a VL CDR1 sequence, a VL CDR2 sequence, and a VL CDR3 sequence, wherein the combination is a combination of the three light chain CDR sequences (VL CDR1, VL CDR2, VL CDR3) shown in a single row in Table 2.

[0432] In some embodiments, at least one arm of the multispecific antibody or antigen-binding fragment thereof, e.g., a bispecific antibody or antigen-binding fragment thereof, comprises a heavy chain variable region that comprise a combination of a VH CDR1 sequence, a VH CDR2 sequence, and a VH CDR3 sequence, wherein the combination is a combination of the three heavy chain CDR sequences (VH CDR1, VH CDR2, VH CDR3) shown in a single row in Table 2.

[0433] In some embodiments, at least one arm of the multispecific antibody or antigen-binding fragment thereof, e.g., a bispecific antibody or antigen-binding fragment thereof, comprises a combination of a VH CDR1 sequence, a VH CDR2 sequence, a VH CDR3 sequence, a VL CDR1 sequence, a VL CDR2 sequence, and a VL CDR3 sequence, wherein each CDR sequence in the combination comprises a sequence that is at least 90%, 91%, 92%, 93%, 94%, 95%, 96%, 97%, 98%, 99% or more identical to the corresponding CDR sequence in a combination of the six CDR sequences (VH CDR1, VH CDR2, VH CDR3, VL CDR1, VL CDR2, and VL CDR3) shown in a single row in Table 2.

[0434] In some embodiments, at least one arm of the multispecific antibody or antigen-binding fragment thereof, e.g., a bispecific antibody or antigen-binding fragment thereof, comprises a heavy chain variable region that comprise a combination of a VH CDR1 sequence, a VH CDR2 sequence, and a VH CDR3 sequence, wherein each CDR sequence in the combination comprises a sequence that is at least 90%, 91%, 92%, 93%, 94%, 95%, 96%, 97%, 98%, 99% or more identical to the corresponding CDR sequence in a combination of three heavy chain CDR sequences (VH CDR1, VH CDR2, VH CDR3) shown in a single row in Table 2.

[0435] In some embodiments, at least one arm of the multispecific antibody or antigen-binding fragment thereof, e.g., a bispecific antibody or antigen-binding fragment thereof, comprises a light chain variable region that comprise a combination of a VL CDR1 sequence, a VL CDR2 sequence, and a VL CDR3 sequence, wherein each CDR sequence in the combination comprises a sequence that is at least 90%, 91%, 92%, 93%, 94%, 95%, 96%, 97%, 98%, 99% or more identical to the corresponding CDR sequence in a combination of three light chain CDR sequences (VL CDR1, VL CDR2, VL CDR3) shown in a single row in Table 2.

[0436] In some embodiments, the multispecific antibodies/activatable antibodies are designed to engage immune effector cells, also referred to herein as immune-effector cell engaging multispecific activatable antibodies. In some embodiments, the multispecific antibodies/activatable antibodies are designed to engage leukocytes, also referred to herein as leukocyte engaging multispecific activatable antibodies. In some embodiments, the multispecific antibodies/activatable antibodies are designed to engage T cells, also referred to herein as T-cell engaging multispecific antibodies/activatable antibodies. In some embodiments, the multispecific antibodies/activatable antibodies engage a surface antigen on a leukocyte, such as on a T cell, on a natural killer (NK) cell, on a myeloid mononuclear cell, on a macrophage, and/or on another immune effector cell. In some embodiments, the immune effector cell is a leukocyte. In some embodiments, the immune effector cell is a T cell. In some embodiments, the immune effector cell is a NK cell. In some embodiments, the immune effector cell is a mononuclear cell, such as a myeloid mononuclear cell. In some embodiments, the multispecific activatable antibodies are designed to bind or otherwise interact with more than one target and/or more than one epitope, also referred to herein as multi-antigen targeting activatable antibodies. As used herein, the terms “target” and “antigen” are used interchangeably.

[0437] In some embodiments, immune effector cell engaging multispecific activatable antibodies of the disclosure include a targeting antibody or antigen-binding fragment thereof that binds CD147 and an immune effector cell engaging antibody or antigen-binding portion thereof, where at least one of the targeting antibody or antigen-binding fragment thereof and/or the immune effector cell engaging antibody or antigen-binding portion thereof is masked. In some embodiments, the immune effector cell engaging antibody or antigen binding fragment thereof includes a first antibody or antigen-binding fragment thereof (AB1) that binds a first, immune effector cell engaging target, where the AB1 is attached to a masking moiety (MM1) such that coupling of the MM1 reduces the ability of the AB1 to bind the first target. In some embodiments, the targeting antibody or antigen-binding fragment thereof includes a second antibody or fragment thereof that includes a second antibody or antigen-binding fragment thereof (AB2) that binds CD147, where the AB2 is attached to a masking moiety (MM2) such that coupling of the MM2 reduces the ability of the AB2 to bind CD147. In some embodiments, the immune effector cell engaging antibody or antigen binding fragment thereof includes a first antibody or antigen-binding fragment thereof (AB1) that binds a first, immune effector cell engaging target, where the AB1 is attached to a masking moiety (MM1) such that coupling of the MM1 reduces the ability of the AB1 to bind the first target, and the targeting antibody or antigen-binding fragment thereof includes a second antibody or fragment thereof that includes a second antibody or antigen-binding fragment thereof (AB2) that binds CD147, where the AB2 is attached to a masking moiety (MM2) such that coupling of the MM2 reduces the ability of the AB2 to bind CD147. In some embodiments, the non-immune effector cell engaging antibody is a cancer targeting antibody. In some embodiments the non-immune cell effector antibody is an IgG. In some embodiments the immune effector cell engaging antibody is a scFv. In some embodiments the CD147-targeting antibody (e.g., non-immune cell effector antibody) is an IgG and the immune effector cell engaging antibody is a scFv. In some embodiments, the immune effector cell is a leukocyte. In some embodiments, the immune effector cell is a T cell. In some embodiments, the immune effector cell is a NK cell. In some embodiments, the immune effector cell is a myeloid mononuclear cell.

[0438] In some embodiments, T-cell engaging multispecific activatable antibodies of the disclosure include a CD147-targeting antibody or antigen-binding fragment thereof and a T-cell engaging antibody or antigen-binding portion thereof, where at least one of the CD147-targeting antibody or antigen-binding fragment thereof and/or the T-cell engaging antibody or antigen-binding portion thereof is masked. In some embodiments, the T-cell engaging antibody or antigen binding fragment thereof includes a first antibody or antigen-binding fragment thereof (AB1) that binds a first, T-cell engaging target, where the AB1 is attached to a masking moiety (MM1) such that coupling of the MM reduces the ability of the AB1 to bind the first target. In some embodiments, the targeting antibody or antigen-binding fragment thereof includes a second antibody or fragment thereof that includes a second antibody or antigen-binding fragment thereof (AB2) that binds CD147, where the AB2 is attached to a masking moiety (MM2) such that coupling of the MM2 reduces the ability of the AB2 to bind CD147. In some embodiments, the T-cell engaging antibody or antigen binding fragment thereof includes a first antibody or antigen-binding fragment thereof (AB1) that binds a first, T-cell engaging target, where the AB1 is attached to a masking moiety (MM1) such that coupling of the MM1 reduces the ability of the AB1 to bind the first target, and the targeting antibody or antigen-binding fragment thereof includes a second antibody or fragment thereof that includes a second antibody or antigen-binding fragment thereof (AB2) that binds CD147, where the AB2 is attached to a masking moiety (MM2) such that coupling of the MM2 reduces the ability of the AB2 to bind CD147.

[0439] In some embodiments of an immune effector cell engaging multispecific antibody/activatable antibody, one antigen is CD147, and another antigen is typically a stimulatory or inhibitory receptor present on the surface of a T-cell, natural killer (NK) cell, myeloid mononuclear cell, macrophage, and/or other immune effector cell, such as, but not limited to, B7-H4, BTLA, CD3, CD4, CD8, CD16a, CD25, CD27, CD28, CD32, CD56, CD137, CTLA-4, GITR, HVEM, ICOS, LAG3, NKG2D, OX40, PD-1, TIGIT, TIM3, or VISTA. In some embodiments, the antigen is a stimulatory receptor present on the surface of a T cell or NK cell; examples of such stimulatory receptors include, but are not limited to, CD3, CD27, CD28, CD137 (also referred to as 4-1BB), GITR, HVEM, ICOS, NKG2D, and OX40. In some embodiments, the antigen is an inhibitory receptor present on the surface of a T-cell; examples of such inhibitory receptors include, but are not limited to, BTLA, CTLA-4, LAG3, PD-1, TIGIT, TIM3, and NK-expressed KIRs. The antibody domain conferring specificity to the T-cell surface antigen may also be substituted by a ligand or ligand domain that binds to a T-cell receptor, a NK-cell receptor, a macrophage receptor, and/or other immune effector cell receptor, such as, but not limited to, B7-1, B7-2, B7H3, PDL1, PDL2, or TNFSF9.

[0440] In some embodiments, the T-cell engaging multispecific activatable antibody includes an anti-CD3 epsilon (CD3ε, also referred to herein as CD3e and CD3) scFv and a targeting antibody or antigen-binding fragment thereof, where at least one of the anti-CD3ε scFv and/or the targeting antibody or antigen-binding portion thereof is masked. In some embodiments, the CD3ε scFv includes a first antibody or antigen-binding fragment thereof (AB1) that binds CD3ε, where the AB1 is attached to a masking moiety (MM1) such that coupling of the MM1 reduces the ability of the AB1 to bind CD3ε. In some embodiments, the targeting antibody or antigen-binding fragment thereof includes a second antibody or fragment thereof that includes a second antibody or antigen-binding fragment thereof (AB2) that binds CD147, where the AB2 is attached to a masking moiety (MM2) such that coupling of the MM2 reduces the ability of the AB2 to bind CD147. In some embodiments, the CD3ε scFv includes a first antibody or antigen-binding fragment thereof (AB1) that binds CD3ε, where the AB1 is attached to a masking moiety (MM1) such that coupling of the MM1 reduces the ability of the AB1 to bind CD3ε, and the targeting antibody or antigen-binding fragment thereof includes a second antibody or fragment thereof that includes a second antibody or antigen-binding fragment thereof (AB2) that binds CD147, where the AB2 is attached to a masking moiety (MM2) such that coupling of the MM2 reduces the ability of the AB2 to bind CD147.

[0441] In some embodiments, the multi-antigen targeting antibodies and/or multi-antigen targeting activatable antibodies include at least a first antibody or antigen-binding fragment thereof that binds a first target and/or first epitope and a second antibody or antigen-binding fragment thereof that binds a second target and/or a second epitope. In some embodiments, the multi-antigen targeting antibodies and/or multi-antigen targeting activatable antibodies bind two or more different targets. In some embodiments, the multi-antigen targeting antibodies and/or multi-antigen targeting activatable antibodies bind two or more different epitopes on the same target. In some embodiments, the multi-antigen targeting antibodies and/or multi-antigen targeting activatable antibodies bind a combination of two or more different targets and two or more different epitopes on the same target.

[0442] In some embodiments, a multispecific activatable antibody comprising an IgG has the IgG variable domains masked. In some embodiments, a multispecific activatable antibody comprising a scFv has the scFv domains masked. In some embodiments, a multispecific activatable antibody has both IgG variable domains and scFv domains, where at least one of the IgG variable domains is coupled to a masking moiety. In some embodiments, a multispecific activatable antibody has both IgG variable domains and scFv domains, where at least one of the scFv domains is coupled to a masking moiety. In some embodiments, a multispecific activatable antibody has both IgG variable domains and scFv domains, where at least one of the IgG variable domains is coupled to a masking moiety and at least one of the scFv domains is coupled to a masking moiety. In some embodiments, a multispecific activatable antibody has both IgG variable domains and scFv domains, where each of the IgG variable domains and the scFv domains is coupled to its own masking moiety. In some embodiments, one antibody domain of a multispecific activatable antibody has specificity for a target antigen and another antibody domain has specificity for a T-cell surface antigen. In some embodiments, one antibody domain of a multispecific activatable antibody has specificity for a target antigen and another antibody domain has specificity for another target antigen. In some embodiments, one antibody domain of a multispecific activatable antibody has specificity for an epitope of a target antigen and another antibody domain has specificity for another epitope of the target antigen.

[0443] In a multispecific activatable antibody, a scFv can be fused to the carboxyl terminus of the heavy chain of an IgG activatable antibody, to the carboxyl terminus of the light chain of an IgG activatable antibody, or to the carboxyl termini of both the heavy and light chains of an IgG activatable antibody. In a multispecific activatable antibody, a scFv can be fused to the amino terminus of the heavy chain of an IgG activatable antibody, to the amino terminus of the light chain of an IgG activatable antibody, or to the amino termini of both the heavy and light chains of an IgG activatable antibody. In a multispecific activatable antibody, a scFv can be fused to any combination of one or more carboxyl termini and one or more amino termini of an IgG activatable antibody. In some embodiments, a masking moiety (MM) linked to a cleavable moiety (CM) is attached to and masks an antigen binding domain of the IgG. In some embodiments, a masking moiety (MM) linked to a cleavable moiety (CM) is attached to and masks an antigen binding domain of at least one scFv. In some embodiments, a masking moiety (MM) linked to a cleavable moiety (CM) is attached to and masks an antigen binding domain of an IgG and a masking moiety (MM) linked to a cleavable moiety (CM) is attached to and masks an antigen binding domain of at least one scFv.

[0444] The disclosure provides examples of multispecific activatable antibody structures which include, but are not limited to, the following: (VL-CL)₂:(VH-CH1-CH2-CH3-L4-VH*-L3-VL*-L2-CM-L1-MM)₂; (VL-CL)₂:(VH-CH1-CH2-CH3-L4-VL*-L3-VH*-L2-CM-L1-MM)₂; (MM-L1-CM-L2-VL-CL)₂:(VH-CH1-CH2-CH3-L4-VH*-L3-VL*)₂; (MM-L1-CM-L2-VL-CL)₂:(VH-CH1-CH2-CH3-L4-VL*-L3-VH*)₂; (VL-CL)₂:(MM-L1-CM-L2-VL*-L3-VH*-L4-VH-CH1-CH2-CH3)₂; (VL-CL)₂:(MM-L1-CM-L2-VH*-L3-VL*-L4-VH-CH1-CH2-CH3)₂, (MM-L1-CM-L2-VL-CL)₂:(VL*-L3-VH*-L4-VH-CH1-CH2-CH3)₂; (MM-L1-CM-L2-VL-CL)₂:(VH*-L3-VL*-L4-VH-CH1-CH2-CH3)₂; (VL-CL-L4-VH*-L3-VL*-L2-CM-L1-MM)₂:(VH-CH1-CH2-CH3)₂; (VL-CL-L4-VL*-L3-VH*-L2-CM-L1-MM)₂:(VH-CH1-CH2-CH3)₂; (MM-L1-CM-L2-VL*-L3-VH*-L4-VL-CL)₂:(VH-CH1-CH2-CH3)₂; (MM-L1-CM-L2-VH*-L3-VL*-L4-VL-CL)₂:(VH-CH1-CH2-CH3)₂; (VL-CL-L4-VH*-L3-VL*-L2-CM-L1-MM)₂: (MM-L1-CM-L2-VL*-L3-VH*-L4-VH-CH1-CH2-CH3)₂; (VL-CL-L4-VH*-L3-VL*-L2-CM-L1-MM)₂: (MM-L1-CM-L2-VH*-L3-VL*-L4-VH-CH1-CH2-CH3)₂; (VL-CL-L4-VL*-L3-VH*-L2-CM-L1-MM)₂: (MM-L1-CM-L2-VL*-L3-VH*-L4-VH-CH1-CH2-CH3)₂; (VL-CL-L4-VL*-L3-VH*-L2-CM-L1-MM)₂: (MM-L1-CM-L2-VH*-L3-VL*-L4-VH-CH1-CH2-CH3)₂; (VL-CL-L4-VH*-L3-VL*)₂: (MM-L1-CM-L2-VL*-L3-VH*-L4-VH-CH1-CH2-CH3)₂; (VL-CL-L4-VH*-L3-VL*)₂: (MM-L1-CM-L2-VH*-L3-VL*-L4-VH-CH1-CH2-CH3)₂; (VL-CL-L4-VL*-L3-VH*)₂: (MM-L1-CM-L2-VL*-L3-VH*-L4-VH-CH1-CH2-CH3)₂; (VL-CL-L4-VL*-L3-VH*)₂: (MM-L1-CM-L2-VH*-L3-VL*-L4A-VH-CH1-CH2-CH3)₂; (VL-CL-L4-VH*-L3-VL*-L2-CM-L1-MM)₂: (VL*-L3-VH*-L4A-VH-CH1-CH2-CH3)₂; (VL-CL-L4-VH*-L3-VL*-L2-CM-L1-MM)₂: (VH*-L3-VL*-L4-VH-CH1-CH2-CH3)₂; (VL-CL-L4-VL*-L3-VH*-L2-CM-L1-MM)₂: (VL*-L3-VH*-L4-VH-CH1-CH2-CH3)₂; or (VL-CL-L4-VL*-L3-VH*-L2-CM-L1-MM)₂: (VH*-L3-VL*-L4-VH-CH1-CH2-CH3)₂, wherein: VL and VH represent the light and heavy variable domains of the first specificity, contained in the IgG; VL* and VH* represent the variable domains of the second specificity, contained in the scFv; L1 is a linker peptide connecting the masking moiety (MM) and the cleavable moiety (CM); L2 is a linker peptide connecting the cleavable moiety (CM), and the antibody; L3 is a linker peptide connecting the variable domains of the scFv; L4 is a linker peptide connecting the antibody of the first specificity to the antibody of the second specificity; CL is the light-chain constant domain; and CH1, CH2, CH3 are the heavy chain constant domains. The first and second specificities can be toward any antigen or epitope.

[0445] In some embodiments of a T-cell engaging multispecific antibody/activatable antibody, one antigen is CD147, and another antigen is typically a stimulatory (also referred to herein as activating) or inhibitory receptor present on the surface of a T-cell, natural killer (NK) cell, myeloid mononuclear cell, macrophage, and/or other immune effector cell, such as, but not limited to, B7-H4, BTLA, CD3, CD4, CD8, CD16a, CD25, CD27, CD28, CD32, CD56, CD137 (also referred to as TNFRSF9), CTLA-4, GITR, HVEM, ICOS, LAG3, NKG2D, OX40, PD-1, TIGIT, TIM3, or VISTA. The antibody domain conferring specificity to the T-cell surface antigen may also be substituted by a ligand or ligand domain that binds to a T-cell receptor, a NK-cell receptor, a macrophage receptor, and/or other immune effector cell receptor.

[0446] In some embodiments, the targeting antibody is a CD147 antibody disclosed herein. In some embodiments, the targeting antibody can be in the form an activatable antibody. In some embodiments, the scFv(s) can be in the form of a Pro-scFv (see, e.g., WO 2009/025846, WO 2010/081173).

[0447] In some embodiments, the scFv is specific for binding CD3ε, and comprises or is derived from an antibody or fragment thereof that binds CD3ε, e.g., CH2527, FN18, H2C, OKT3, 2C11, UCHT1, or V9. In some embodiments, the scFv is specific for binding CTLA-4 (also referred to herein as CTLA and CTLA4).

[0448] In some embodiments, the anti-CTLA-4 scFv includes the amino acid sequence:

(SEQ ID NO: 643)

GGGSGGGGSGSGGGSGGGGSGGGEIVLTQSPGTLSLSPGERATLSCRASQ
SVSSSYLAWYQQKPGQAPRLLIYGASSRATGIPDRFSGSGSGTDFTLTIS
RLEPEDFAVYYCQQYGSSPLTFGGGTKVEIKRSGGSTITSYNVYYTKLSS
SGTQVQLVQTGGGVVQPGRSLRLSCAASGSTFSSYAMSWVRQAPGKGLEW
VSAISGSGGSTYYADSVKGRFTISRDNSKNTLYLQMNSLRAEDTAVYYCA
TNSLYWYFDLWGRGTLVTVSSAS

[0449] In some embodiments, the anti-CTLA-4 scFv includes the amino acid sequence that is at least 90%, 91%, 92%, 93%, 94%, 95%, 96%, 97%, 98%, 99% or more identical to the amino acid sequence of SEQ ID NO: 643.

[0450] In some embodiments, the anti-CD3s scFv includes the amino acid sequence:

(SEQ ID NO: 644)

GGGSGGGGSGSGGGSGGGGSGGGQVQLQQSGAELARPGASVKMSCKASGY
TFTRYTMEWVKQRPGQGLEWIGYINPSRGYTNYNQKFKDKATLTTDKSSS
TAYMQLSSLTSEDSAVYYCARYYDDHYCLDYWGQGTTLTVSSGGGGSGGG
GSGGGGSQIVLTQSPAIMSASPGEKVTMTCSASSSVSYMNWYQQKSGTSP
KRWIYDTSKLASGVPAHFRGSGSGTSYSLTISGMEAEDAATYYCQQWSSN
PFTFGSGTKLEINR

[0451] In some embodiments, the anti-CD3ε scFv includes the amino acid sequence that is at least 90%, 91%, 92%, 93%, 94%, 95%, 96%, 97%, 98%, 99% or more identical to the amino acid sequence of SEQ ID NO: 644.

[0452] In some embodiments, the scFv is specific for binding one or more T-cells, one or more NK-cells and/or one or more macrophages. In some embodiments, the scFv is specific for binding a target selected from the group consisting of B7-H4, BTLA, CD3, CD4, CD8, CD16a, CD25, CD27, CD28, CD32, CD56, CD137, CTLA-4, GITR, HVEM, ICOS, LAG3, NKG2D, OX40, PD-1, TIGIT, TIM3, or VISTA.

[0453] In some embodiments, the multispecific antibody/activatable antibody also includes an agent conjugated to the AB. In some embodiments, the agent is a therapeutic agent. In some embodiments, the agent is an antineoplastic agent. In some embodiments, the agent is a toxin or fragment thereof. In some embodiments, the agent is conjugated to the multispecific antibody/activatable antibody via a linker. In some embodiments, the agent is conjugated to the AB via a cleavable linker. In some embodiments, the linker is a non-cleavable linker. In some embodiments, the agent is a microtubule inhibitor. In some embodiments, the agent is a nucleic acid damaging agent, such as a DNA alkylator or DNA intercalator, or other DNA damaging agent. In some embodiments, the linker is a cleavable linker. In some embodiments, the agent is an agent selected from the group listed in Table 6. In some embodiments, the agent is a dolastatin. In some embodiments, the agent is an auristatin or derivative thereof. In some embodiments, the agent is auristatin E or a derivative thereof. In some embodiments, the agent is monomethyl auristatin E (MMAE). In some embodiments, the agent is monomethyl auristatin D (MMAD). In some embodiments, the agent is a maytansinoid or maytansinoid derivative. In some embodiments, the agent is DM1 or DM4. In some embodiments, the agent is a duocarmycin or derivative thereof. In some embodiments, the agent is a calicheamicin or derivative thereof. In some embodiments, the agent is a pyrrolobenzodiazepine. In some embodiments, the agent is a pyrrolobenzodiazepine dimer.

[0454] In some embodiments, the multispecific antibody/activatable antibody also includes a detectable moiety. In some embodiments, the detectable moiety is a diagnostic agent.

[0455] In some embodiments, the multispecific antibody/activatable antibody naturally contains one or more disulfide bonds. In some embodiments, the multispecific activatable antibody can be engineered to include one or more disulfide bonds.

[0456] The disclosure also provides an isolated nucleic acid molecule encoding a multispecific antibody/activatable antibody described herein, as well as vectors that include these isolated nucleic acid sequences. The disclosure provides methods of producing a multispecific antibody/activatable antibody by culturing a cell under conditions that lead to expression of the antibody/activatable antibody, wherein the cell comprises such a nucleic acid molecule. In some embodiments, the cell comprises such a vector.

[0457] The disclosure also provides a method of manufacturing multispecific CD147 antibodies of the disclosure by (a) culturing a cell comprising a nucleic acid construct that encodes the multispecific antibody under conditions that lead to expression of the multispecific antibody.

[0458] The disclosure also provides a method of manufacturing multispecific activatable CD147 antibodies of the disclosure by (a) culturing a cell comprising a nucleic acid construct that encodes the multispecific activatable antibody under conditions that lead to expression of the multispecific activatable antibody, and (b) recovering the multispecific activatable antibody. Suitable AB, MM, and/or CM include any of the AB, MM, and/or CM disclosed herein.

[0459] The disclosure also provides multispecific activatable antibodies and/or multispecific activatable antibody compositions that include at least a first antibody or antigen-binding fragment thereof (AB1) that specifically binds a first target or first epitope and a second antibody or antigen-biding fragment thereof (AB2) that binds a second target or a second epitope, where at least AB1 is coupled or otherwise attached to a masking moiety (MM1), such that coupling of the MM1 reduces the ability of AB1 to bind its target. In some embodiments, the MM1 is coupled to AB1 via a first cleavable moiety (CM1) sequence that includes a substrate for a protease, for example, a protease that is co-localized with the target of AB1 at a treatment site or a diagnostic site in a subject. The multispecific activatable antibodies provided herein are stable in circulation, activated at intended sites of therapy and/or diagnosis but not in normal, i.e., healthy tissue, and, when activated, exhibit binding to the target of AB1 that is at least comparable to the corresponding, unmodified multispecific antibody. Suitable AB, MM, and/or CM include any of the AB, MM, and/or CM disclosed herein.

[0460] The disclosure also provides compositions and methods that include a multispecific activatable antibody that includes at least a first antibody or antibody fragment (AB1) that specifically binds a target and a second antibody or antibody fragment (AB2), where at least the first AB in the multispecific activatable antibody is coupled to a masking moiety (MM1) that decreases the ability of AB1 to bind its target. In some embodiments, each AB is coupled to a MM that decreases the ability of its corresponding AB to each target. For example, in bispecific activatable antibody embodiments, AB1 is coupled to a first masking moiety (MM1) that decreases the ability of AB1 to bind its target, and AB2 is coupled to a second masking moiety (MM2) that decreases the ability of AB2 to bind its target. In some embodiments, the multispecific activatable antibody comprises more than two AB regions; in such embodiments, AB1 is coupled to a first masking moiety (MM1) that decreases the ability of AB1 to bind its target, AB2 is coupled to a second masking moiety (MM2) that decreases the ability of AB2 to bind its target, AB3 is coupled to a third masking moiety (MM3) that decreases the ability of AB3 to bind its target, and so on for each AB in the multispecific activatable antibody. Suitable AB, MM, and/or CM include any of the AB, MM, and/or CM disclosed herein.

[0461] In some embodiments, the multispecific activatable antibody further includes at least one cleavable moiety (CM) that is a substrate for a protease, where the CM links a MM to an AB. For example, in some embodiments, the multispecific activatable antibody includes at least a first antibody or antibody fragment (AB1) that specifically binds a target and a second antibody or antibody fragment (AB2), where at least the first AB in the multispecific activatable antibody is coupled via a first cleavable moiety (CM1) to a masking moiety (MM1) that decreases the ability of AB1 to bind its target. In some bispecific activatable antibody embodiments, AB1 is coupled via CM1 to MM1, and AB2 is coupled via a second cleavable moiety (CM2) to a second masking moiety (MM2) that decreases the ability of AB2 to bind its target. In some embodiments, the multispecific activatable antibody comprises more than two AB regions; in some of these embodiments, AB1 is coupled via CM1 to MM1, AB2 is coupled via CM2 to MM2, and AB3 is coupled via a third cleavable moiety (CM3) to a third masking moiety (MM3) that decreases the ability of AB3 to bind its target, and so on for each AB in the multispecific activatable antibody. Suitable AB, MM, and/or CM include any of the AB, MM, and/or CM disclosed herein.

[0462] Activatable Antibodies Having Non-Binding Steric Moieties or Binding Partners for Non-Binding Steric Moieties

[0463] The disclosure also provides activatable antibodies that include non-binding steric moieties (NB) or binding partners (BP) for non-binding steric moieties, where the BP recruits or otherwise attracts the NB to the activatable antibody. The activatable antibodies provided herein include, for example, an activatable antibody that includes a non-binding steric moiety (NB), a cleavable linker (CL) and antibody or antibody fragment (AB) that binds a target; an activatable antibody that includes a binding partner for a non-binding steric moiety (BP), a CL and an AB; and an activatable antibody that includes a BP to which an NB has been recruited, a CL and an AB that binds the target. Activatable antibodies in which the NB is covalently linked to the CL and AB of the activatable antibody or is associated by interaction with a BP that is covalently linked to the CL and AB of the activatable antibody are referred to herein as “NB-containing activatable antibodies.” By activatable or switchable is meant that the activatable antibody exhibits a first level of binding to a target when the activatable antibody is in an inhibited, masked or uncleaved state (i.e., a first conformation), and a second level of binding to the target when the activatable antibody is in an uninhibited, unmasked and/or cleaved state (i.e., a second conformation, i.e., activated antibody), where the second level of target binding is greater than the first level of target binding. The activatable antibody compositions can exhibit increased bioavailability and more favorable biodistribution compared to conventional antibody therapeutics.

[0464] In some embodiments, activatable antibodies provide for reduced toxicity and/or adverse side effects that could otherwise result from binding of the at non-treatment sites and/or non-diagnostic sites if the AB were not masked or otherwise inhibited from binding to such a site.

[0465] CD147 activatable antibodies that include a non-binding steric moiety (NB) can be made using the methods set forth in PCT Publication No. WO 2013/192546, the contents of which are hereby incorporated by reference in their entirety.

[0466] Therapeutic Uses of Antibodies, and Activatable Antibodies

[0467] The invention provides methods of preventing, delaying the progression of, treating, alleviating a symptom of, or otherwise ameliorating a CD147-mediated disease in a subject by administering a therapeutically effective amount of a CD147 antibody, conjugated CD147 antibody, activatable CD147 antibody and/or conjugated activatable CD147 antibody described herein to a subject in need thereof.

[0468] There is provided a CD147 antibody, conjugated CD147 antibody, activatable CD147 antibody and/or conjugated activatable CD147 antibody for use in preventing, delaying the progression of, treating, alleviating a symptom of, or otherwise ameliorating a CD147-mediated disease.

[0469] The invention also provides methods of preventing, delaying the progression of, treating, alleviating a symptom of, or otherwise ameliorating cancer in a subject by administering a therapeutically effective amount of a CD147 antibody, conjugated CD147 antibody, activatable CD147 antibody and/or conjugated activatable CD147 antibody described herein to a subject in need thereof.

[0470] There is provided a CD147 antibody, conjugated CD147 antibody, activatable CD147 antibody and/or conjugated activatable CD147 antibody for use in preventing, delaying the progression of, treating, alleviating a symptom of, or otherwise ameliorating cancer.

[0471] The invention also provides methods of treating, preventing and/or delaying the onset or progression of, or alleviating a symptom associated with aberrant expression and/or activity of CD147 in a subject using antibodies/activatable antibodies that bind CD147, particularly activatable antibodies that bind and neutralize or otherwise inhibit at least one biological activity of CD147 and/or CD147-mediated signaling.

[0472] Thus, there is provided antibodies/activatable antibodies that bind CD147 for use in treating, preventing and/or delaying the onset or progression of, ameliorating, or alleviating a symptom associated with aberrant expression and/or activity of CD147.

[0473] The invention also provides methods of treating, preventing and/or delaying the onset or progression of, or alleviating a symptom associated with the presence, growth, proliferation, metastasis, and/or activity of cells which are expressing CD147 or aberrantly expressing CD147 in a subject using antibodies/activatable antibodies that bind CD147, particularly activatable antibodies that bind, target, neutralize, kill, or otherwise inhibit at least one biological activity of cells which are expressing or aberrantly expressing CD147.

[0474] The invention also provides methods of treating, preventing and/or delaying the onset or progression of, or alleviating a symptom associated with the presence, growth, proliferation, metastasis, and/or activity of cells which are expressing CD147 in a subject using antibodies/activatable antibodies that bind CD147, particularly antibodies/activatable antibodies that bind, target, neutralize, kill, or otherwise inhibit at least one biological activity of cells which are expressing CD147.

[0475] The invention also provides methods of treating, preventing and/or delaying the onset or progression of, or alleviating a symptom associated with the presence, growth, proliferation, metastasis, and/or activity of cells which are aberrantly expressing CD147 in a subject using antibodies/activatable antibodies that bind CD147, particularly antibodies/activatable antibodies that bind, target, neutralize, kill, or otherwise inhibit at least one biological activity of cells which are aberrantly expressing CD147.

[0476] CD147 is known to be expressed in a variety of cancers, such as, by way of non-limiting example, adenocarcinoma, bile duct (biliary) cancer, bladder cancer, breast cancer, e.g., triple-negative breast cancer and Her2-negative breast cancer; carcinoid cancer; cervical cancer; cholangiocarcinoma; colorectal; endometrial; esophageal cancer; glioma; head and neck cancer, e.g., head and neck squamous cell cancer; leukemia; liver cancer; lung cancer, e.g., NSCLC, SCLC; lymphoma; melanoma; osopharyngeal cancer; ovarian cancer; pancreatic cancer; prostate cancer, e.g., metastatic castration-resistant prostate carcinoma; renal cancer; skin cancer; squamous cell cancer, stomach cancer; testis cancer; thyroid cancer; and urothelial cancer.

[0477] In some embodiments, the cancer is associated with a CD147-expressing tumor. In some embodiments, the cancer is due to a CD147-expressing tumor.

[0478] A CD147 antibody, conjugated CD147 antibody, activatable CD147 antibody and/or conjugated activatable CD147 antibody used in any of the embodiments of these methods and uses can be administered at any stage of the disease. For example, such a CD147 antibody, conjugated CD147 antibody, activatable CD147 antibody and/or conjugated activatable CD147 antibody can be administered to a patient suffering cancer of any stage, from early to metastatic. The terms subject and patient are used interchangeably herein.

[0479] In some embodiments, the subject is a mammal, such as a human, non-human primate, companion animal (e.g., cat, dog, horse), farm animal, work animal, or zoo animal. In some embodiments, the subject is a human. In some embodiments, the subject is a companion animal. In some embodiments, the subject is an animal in the care of a veterinarian.

[0480] The CD147 antibody, conjugated CD147 antibody, activatable CD147 antibody and/or conjugated activatable CD147 antibody and therapeutic formulations thereof are administered to a subject suffering from or susceptible to a disease or disorder associated with aberrant CD147 expression and/or activity. A subject suffering from or susceptible to a disease or disorder associated with aberrant CD147 expression and/or activity is identified using any of a variety of methods known in the art. For example, subjects suffering from cancer or other neoplastic condition are identified using any of a variety of clinical and/or laboratory tests such as, physical examination and blood, urine and/or stool analysis to evaluate health status. For example, subjects suffering from inflammation and/or an inflammatory disorder are identified using any of a variety of clinical and/or laboratory tests such as physical examination and/or bodily fluid analysis, e.g., blood, urine and/or stool analysis, to evaluate health status.

[0481] Administration of a CD147 antibody, conjugated CD147 antibody, activatable CD147 antibody and/or conjugated activatable CD147 antibody to a patient suffering from a disease or disorder associated with aberrant CD147 expression and/or activity is considered successful if any of a variety of laboratory or clinical objectives is achieved. For example, administration of a CD147 antibody, conjugated CD147 antibody, activatable CD147 antibody and/or conjugated activatable CD147 antibody to a patient suffering from a disease or disorder associated with aberrant CD147 expression and/or activity is considered successful if one or more of the symptoms associated with the disease or disorder is alleviated, reduced, inhibited or does not progress to a further, i.e., worse, state. Administration of a CD147 antibody, conjugated CD147 antibody, activatable CD147 antibody and/or conjugated activatable CD147 antibody to a patient suffering from a disease or disorder associated with aberrant CD147 expression and/or activity is considered successful if the disease or disorder enters remission or does not progress to a further, i.e., worse, state.

[0482] In some embodiments, the CD147 antibody, conjugated CD147 antibody, activatable CD147 antibody and/or conjugated activatable CD147 antibody and therapeutic formulations thereof are administered to a subject suffering from or susceptible to a disease or disorder, such as subjects suffering from cancer or other neoplastic condition, wherein the subject's diseased cells are expressing CD147. In some embodiments, the diseased cells are associated with aberrant CD147 expression and/or activity. In some embodiments, the diseased cells are associated with normal CD147 expression and/or activity. A subject suffering from or susceptible to a disease or disorder wherein the subject's diseased cells express CD147 is identified using any of a variety of methods known in the art. For example, subjects suffering from cancer or other neoplastic condition are identified using any of a variety of clinical and/or laboratory tests such as, physical examination and blood, urine and/or stool analysis to evaluate health status. For example, subjects suffering from inflammation and/or an inflammatory disorder are identified using any of a variety of clinical and/or laboratory tests such as physical examination and/or bodily fluid analysis, e.g., blood, urine and/or stool analysis, to evaluate health status.

[0483] In some embodiments, the CD147 antibody, conjugated CD147 antibody, activatable CD147 antibody and/or conjugated activatable CD147 antibody and therapeutic formulations thereof are administered to a subject suffering from or susceptible to a disease or disorder associated with cells expressing CD147 or the presence, growth, proliferation, metastasis, and/or activity of such cells, such as subjects suffering from cancer or other neoplastic conditions. In some embodiments, the cells are associated with aberrant CD147 expression and/or activity. In some embodiments, the cells are associated with normal CD147 expression and/or activity. A subject suffering from or susceptible to a disease or disorder associated with cells that express CD147 is identified using any of a variety of methods known in the art. For example, subjects suffering from cancer or other neoplastic condition are identified using any of a variety of clinical and/or laboratory tests such as, physical examination and blood, urine and/or stool analysis to evaluate health status. For example, subjects suffering from inflammation and/or an inflammatory disorder are identified using any of a variety of clinical and/or laboratory tests such as physical examination and/or bodily fluid analysis, e.g., blood, urine and/or stool analysis, to evaluate health status.

[0484] Administration of a CD147 antibody, conjugated CD147 antibody, activatable CD147 antibody and/or conjugated activatable CD147 antibody to a patient suffering from a disease or disorder associated with cells expressing CD147 is considered successful if any of a variety of laboratory or clinical objectives is achieved. For example, administration a CD147 antibody, conjugated CD147 antibody, activatable CD147 antibody and/or conjugated activatable CD147 antibody to a patient suffering from a disease or disorder associated with cells expressing CD147 is considered successful if one or more of the symptoms associated with the disease or disorder is alleviated, reduced, inhibited or does not progress to a further, i.e., worse, state. Administration of a CD147 antibody, conjugated CD147 antibody, activatable CD147 antibody and/or conjugated activatable CD147 antibody to a patient suffering from a disease or disorder associated with cells expressing CD147 is considered successful if the disease or disorder enters remission or does not progress to a further, i.e., worse, state.

[0485] In some embodiments, the CD147 antibody, conjugated CD147 antibody, activatable CD147 antibody and/or conjugated activatable CD147 antibody is administered during and/or after treatment in combination with one or more additional agents such as, for example, a chemotherapeutic agent, an anti-inflammatory agent, and/or an immunosuppressive agent. In some embodiments, the CD147 antibody, conjugated CD147 antibody, activatable CD147 antibody and/or conjugated activatable CD147 antibody and the additional agent(s) are administered simultaneously. For example, the CD147 antibody, conjugated CD147 antibody, activatable CD147 antibody and/or conjugated activatable CD147 antibody and the additional agent(s) can be formulated in a single composition or administered as two or more separate compositions. In some embodiments, the CD147 antibody, conjugated CD147 antibody, activatable CD147 antibody and/or conjugated activatable CD147 antibody and the additional agent(s) are administered sequentially.

[0486] The disclosure also provides methods of treating, alleviating a symptom of, or delaying the progression of a disorder or disease in which diseased cells express CD147 comprising administering a therapeutically effective amount of an antibody/conjugated antibody/activatable antibody/conjugated activatable antibody of the disclosure or a pharmaceutical composition comprising an antibody/conjugated antibody/activatable antibody/conjugated activatable antibody of the disclosure to a subject in need thereof. In some embodiments, the disorder or disease is cancer.

[0487] The disclosure also provides methods of treating, alleviating a symptom of, or delaying the progression of a disorder or disease associated with cells expressing CD147 comprising administering a therapeutically effective amount of an antibody/conjugated antibody/activatable antibody/conjugated activatable antibody of the disclosure or a pharmaceutical composition comprising an antibody/conjugated antibody/activatable antibody/conjugated activatable antibody of the disclosure to a subject in need thereof. In some embodiments, the disorder or disease associated with cells expressing CD147 is cancer. In some embodiments, the cancer is an adenocarcinoma, a bile duct (biliary) cancer, a bladder cancer, a bone cancer, a breast cancer, a triple-negative breast cancer, a Her2-negative breast cancer, a carcinoid cancer, a cervical cancer, a cholangiocarcinoma, a colorectal cancer, a colon cancer, an endometrial cancer, an esophageal cancer, a glioma, a head and neck cancer, a head and neck squamous cell cancer, a leukemia, a liver cancer, a lung cancer, a non-small cell lung cancer, a small cell lung cancer, a lymphoma, a melanoma, an oropharyngeal cancer, an ovarian cancer, a pancreatic cancer, a prostate cancer, a metastatic castration-resistant prostate carcinoma, a renal cancer, a sarcoma, a skin cancer, a squamous cell cancer, a stomach cancer, a testis cancer, a thyroid cancer, a urogenital cancer, or a urothelial cancer. In some embodiments, the expression and/or activity of the mammalian CD147 is aberrant. In some embodiments, the method comprises administering an additional agent. In some embodiments, the additional agent is a therapeutic agent.

[0488] The disclosure also provides methods of inhibiting or reducing the growth, proliferation, or metastasis of cells expressing mammalian CD147 comprising administering a therapeutically effective amount of an antibody/conjugated antibody/activatable antibody/conjugated activatable antibody of the disclosure or a pharmaceutical composition comprising an antibody/conjugated antibody/activatable antibody/conjugated activatable antibody of the disclosure to a subject in need thereof. In some embodiments, the expression and/or activity of the mammalian CD147 is aberrant. In some embodiments, the method comprises administering an additional agent. In some embodiments, the additional agent is a therapeutic agent.

[0489] The disclosure also provides methods of inhibiting, blocking, or preventing the binding of a natural ligand to mammalian CD147, comprising administering a therapeutically effective amount of an antibody/conjugated antibody/activatable antibody/conjugated activatable antibody of the disclosure or a pharmaceutical composition comprising an antibody/conjugated antibody/activatable antibody/conjugated activatable antibody of the disclosure to a subject in need thereof. In some embodiments, the expression and/or activity of the mammalian CD147 is aberrant. In some embodiments, the method comprises administering an additional agent. In some embodiments, the additional agent is a therapeutic agent.

[0490] The disclosure also provides methods of treating, alleviating a symptom of, or delaying the progression of a disorder or disease in which diseased cells express CD147 comprising administering a therapeutically effective amount of an antibody/conjugated antibody/activatable antibody/conjugated activatable antibody of the disclosure or a pharmaceutical composition comprising an antibody/conjugated antibody/activatable antibody/conjugated activatable antibody of the disclosure to a subject in need thereof. In some embodiments, the disorder or disease is cancer.

[0491] The disclosure also provides methods of treating, alleviating a symptom of, or delaying the progression of a disorder or disease associated with cells expressing CD147 comprising administering a therapeutically effective amount of an antibody/conjugated antibody/activatable antibody/conjugated activatable antibody of the disclosure or a pharmaceutical composition comprising an antibody/conjugated antibody/activatable antibody/conjugated activatable antibody of the disclosure to a subject in need thereof. In some embodiments, the disorder or disease associated with cells expressing CD147 is cancer. In some embodiments, the cancer is an adenocarcinoma, a bile duct (biliary) cancer, a bladder cancer, a bone cancer, a breast cancer, a triple-negative breast cancer, a Her2-negative breast cancer, a carcinoid cancer, a cervical cancer, a cholangiocarcinoma, a colorectal cancer, a colon cancer, an endometrial cancer, an esophageal cancer, a glioma, a head and neck cancer, a head and neck squamous cell cancer, a leukemia, a liver cancer, a lung cancer, a non-small cell lung cancer, a small cell lung cancer, a lymphoma, a melanoma, an oropharyngeal cancer, an ovarian cancer, a pancreatic cancer, a prostate cancer, a metastatic castration-resistant prostate carcinoma, a renal cancer, a sarcoma, a skin cancer, a squamous cell cancer, a stomach cancer, a testis cancer, a thyroid cancer, a urogenital cancer, or a urothelial cancer. In some embodiments, the expression and/or activity of the mammalian CD147 is aberrant. In some embodiments, the method comprises administering an additional agent. In some embodiments, the additional agent is a therapeutic agent.

[0492] The disclosure also provides methods of inhibiting or reducing the growth, proliferation, or metastasis of cells expressing mammalian CD147 comprising administering a therapeutically effective amount of an antibody/conjugated antibody/activatable antibody/conjugated activatable antibody of the disclosure or a pharmaceutical composition comprising an antibody/conjugated antibody/activatable antibody/conjugated activatable antibody of the disclosure to a subject in need thereof. In some embodiments, the expression and/or activity of the mammalian CD147 is aberrant. In some embodiments, the method comprises administering an additional agent. In some embodiments, the additional agent is a therapeutic agent.

[0493] The disclosure also provides methods of inhibiting, blocking, or preventing the binding of a natural ligand to mammalian CD147, comprising administering a therapeutically effective amount of an antibody/conjugated antibody/activatable antibody/conjugated activatable antibody of the disclosure or a pharmaceutical composition comprising an antibody/conjugated antibody/activatable antibody/conjugated activatable antibody of the disclosure to a subject in need thereof. In some embodiments, the expression and/or activity of the mammalian CD147 is aberrant. In some embodiments, the method comprises administering an additional agent. In some embodiments, the additional agent is a therapeutic agent.

[0494] Formulations

[0495] It will be appreciated that administration of therapeutic entities in accordance with the disclosure will be administered with suitable carriers, excipients, and other agents that are incorporated into formulations to provide improved transfer, delivery, tolerance, and the like. A multitude of appropriate formulations can be found in the formulary known to all pharmaceutical chemists: Remington's Pharmaceutical Sciences (15th ed, Mack Publishing Company, Easton, Pa. (1975)), particularly Chapter 87 by Blaug, Seymour, therein. These formulations include, for example, powders, pastes, ointments, jellies, waxes, oils, lipids, lipid (cationic or anionic) containing vesicles (such as Lipofectin™), DNA conjugates, anhydrous absorption pastes, oil-in-water and water-in-oil emulsions, emulsions carbowax (polyethylene glycols of various molecular weights), semi-solid gels, and semi-solid mixtures containing carbowax. Any of the foregoing mixtures may be appropriate in treatments and therapies in accordance with the present disclosure, provided that the active ingredient in the formulation is not inactivated by the formulation and the formulation is physiologically compatible and tolerable with the route of administration. See also Baldrick P. “Pharmaceutical excipient development: the need for preclinical guidance.” Regul. Toxicol Pharmacol. 32(2):210-8 (2000), Wang W. “Lyophilization and development of solid protein pharmaceuticals.” Int. J. Pharm. 203(1-2):1-60 (2000), Charman W N “Lipids, lipophilic drugs, and oral drug delivery-some emerging concepts.” J Pharm Sci. 89(8):967-78 (2000), Powell et al. “Compendium of excipients for parenteral formulations” PDA J Pharm Sci Technol. 52:238-311 (1998) and the citations therein for additional information related to formulations, excipients and carriers well known to pharmaceutical chemists.

[0496] Therapeutic formulations of the disclosure, which include a CD147 antibody and/or activatable CD147 antibody, such as by way of non-limiting example, an antibody, a conjugated antibody, an activatable antibody and/or a conjugated activatable antibody, are used to prevent, treat or otherwise ameliorate a disease or disorder associated with aberrant target expression and/or activity. For example, therapeutic formulations of the disclosure, which include an antibody, a conjugated antibody, an activatable antibody and/or a conjugated activatable antibody, are used to treat or otherwise ameliorate a cancer or other neoplastic condition, inflammation, an inflammatory disorder, and/or an autoimmune disease. In some embodiments, the cancer is a solid tumor or a hematologic malignancy where the target is expressed. In some embodiments, the cancer is a solid tumor where the target is expressed. In some embodiments, the cancer is a hematologic malignancy where the target is expressed. In some embodiments, the target is expressed on parenchyma (e.g., in cancer, the portion of an organ or tissue that often carries out function(s) of the organ or tissue). In some embodiments, the target is expressed on a cell, tissue, or organ. In some embodiments, the target is expressed on stroma (i.e., the connective supportive framework of a cell, tissue, or organ). In some embodiments, the target is expressed on an osteoblast. In some embodiments, the target is expressed on the endothelium (vasculature). In some embodiments, the target is expressed on a cancer stem cell. In some embodiments, the agent to which the antibody and/or the activatable antibody is conjugated is a microtubule inhibitor. In some embodiments, the agent to which the antibody and/or the activatable antibody is conjugated is a nucleic acid damaging agent.

[0497] Efficaciousness of prevention, amelioration or treatment is determined in association with any known method for diagnosing or treating the disease or disorder associated with target expression and/or activity, such as, for example, aberrant target expression and/or activity. Prolonging the survival of a subject or otherwise delaying the progression of the disease or disorder associated with target expression and/or activity, e.g., aberrant target expression and/or activity, in a subject indicates that the antibody, conjugated antibody, activatable antibody and/or conjugated activatable antibody confers a clinical benefit.

[0498] An antibody, a conjugated antibody, an activatable antibody and/or a conjugated activatable antibody can be administered in the form of pharmaceutical compositions. Principles and considerations involved in preparing such compositions, as well as guidance in the choice of components are provided, for example, in Remington: The Science And Practice Of Pharmacy 19th ed. (Alfonso R. Gennaro, et al., editors) Mack Pub. Co., Easton, Pa.: 1995; Drug Absorption Enhancement: Concepts, Possibilities, Limitations, And Trends, Harwood Academic Publishers, Langhorne, Pa., 1994; and Peptide And Protein Drug Delivery (Advances In Parenteral Sciences, Vol. 4), 1991, M. Dekker, New York.

[0499] In some embodiments where antibody fragments are used, the smallest fragment that specifically binds to the binding domain of the target protein is selected. For example, based upon the variable-region sequences of an antibody, peptide molecules can be designed that retain the ability to bind the target protein sequence. Such peptides can be synthesized chemically and/or produced by recombinant DNA technology. (See, e.g., Marasco et al., Proc. Natl. Acad. Sci. USA, 90: 7889-7893 (1993)). The formulation can also contain more than one active compounds as necessary for the particular indication being treated, for example, in some embodiments, those with complementary activities that do not adversely affect each other. In some embodiments, or in addition, the composition can comprise an agent that enhances its function, such as, for example, a cytotoxic agent, cytokine, chemotherapeutic agent, or growth-inhibitory agent. Such molecules are suitably present in combination in amounts that are effective for the purpose intended.

[0500] The active ingredients can also be entrapped in microcapsules prepared, for example, by coacervation techniques or by interfacial polymerization, for example, hydroxymethylcellulose or gelatin-microcapsules and poly-(methylmethacrylate) microcapsules, respectively, in colloidal drug delivery systems (for example, liposomes, albumin microspheres, microemulsions, nano-particles, and nanocapsules) or in macroemulsions.

[0501] The formulations to be used for in vivo administration must be sterile. This is readily accomplished by filtration through sterile filtration membranes.

[0502] Sustained-release preparations can be prepared. Suitable examples of sustained-release preparations include semipermeable matrices of solid hydrophobic polymers containing the antibody, which matrices are in the form of shaped articles, e.g., films, or microcapsules. Examples of sustained-release matrices include polyesters, hydrogels (for example, poly(2-hydroxyethyl-methacrylate), or poly(vinylalcohol)), polylactides (U.S. Pat. No. 3,773,919), copolymers of L-glutamic acid and γ ethyl-L-glutamate, non-degradable ethylene-vinyl acetate, degradable lactic acid-glycolic acid copolymers such as the LUPRON DEPOT™ (injectable microspheres composed of lactic acid-glycolic acid copolymer and leuprolide acetate), and poly-D-(−)-3-hydroxybutyric acid. While polymers such as ethylene-vinyl acetate and lactic acid-glycolic acid enable release of molecules for over 100 days, certain hydrogels release proteins for shorter time periods.

[0503] Combination Treatments

[0504] In some embodiments, the CD147 antibodies, conjugated CD147 antibodies, activatable CD147 antibodies and/or conjugated activatable CD147 antibodies described herein are used in conjunction with one or more additional agents or a combination of additional agents. Suitable additional agents include current pharmaceutical and/or surgical therapies for an intended application, such as, for example, cancer. For example, the CD147 antibodies, conjugated CD147 antibodies, activatable CD147 antibodies and/or conjugated activatable CD147 antibodies can be used in conjunction with an additional chemotherapeutic agent, anti-neoplastic agent, anti-inflammatory agent, an immunosuppressive agent, an alkylating agent, an anti-metabolite, an anti-microtubule agent, a topoisomerase inhibitor, a cytotoxic antibiotic, and/or any other nucleic acid damaging agent.

[0505] In some embodiments, the additional agent(s) is a chemotherapeutic agent, such as a chemotherapeutic agent selected from the group consisting of docetaxel, paclitaxel, abraxane (i.e., albumin-conjugated paclitaxel), doxorubicin, oxaliplatin, carboplatin, cisplatin, irinotecan, and gemcitabine.

[0506] In some embodiments, the additional agent(s) is a checkpoint inhibitor, a kinase inhibitor, an agent targeting inhibitors in the tumor microenvironment, and/or a T cell or NK agonist. In some embodiments, the additional agent(s) is radiation therapy, alone or in combination with another additional agent(s) such as a chemotherapeutic or anti-neoplastic agent. In some embodiments, the additional agent(s) is a vaccine, an oncovirus, and/or a DC-activating agent such as, by way of non-limiting example, a toll-like receptor (TLR) agonist and/or α-CD40. In some embodiments, the additional agent(s) is a tumor-targeted antibody designed to kill the tumor via ADCC or via direct conjugation to a toxin (e.g., an antibody drug conjugate (ADC).

[0507] In some embodiments, the checkpoint inhibitor is an inhibitor of a target selected from the group consisting of CTLA-4, LAG-3, PD-1, CD147, TIGIT, TIM-3, B7H4, and Vista. In some embodiments, the kinase inhibitor is selected from the group consisting of B-RAFi, MEKi, and Btk inhibitors, such as ibrutinib. In some embodiments, the kinase inhibitor is crizotinib. In some embodiments, the tumor microenvironment inhibitor is selected from the group consisting of an IDO inhibitor, an α-CSF1R inhibitor, an α-CCR4 inhibitor, a TGF-beta, a myeloid-derived suppressor cell, or a T-regulatory cell. In some embodiments, the agonist is selected from the group consisting of Ox40, GITR, CD137, ICOS, CD27, and HVEM.

[0508] In some embodiments, the inhibitor is a CTLA-4 inhibitor. In some embodiments, the inhibitor is a LAG-3 inhibitor. In some embodiments, the inhibitor is a PD-1 inhibitor. In some embodiments, the inhibitor is a CD147 inhibitor. In some embodiments, the inhibitor is a TIGIT inhibitor. In some embodiments, the inhibitor is a TIM-3 inhibitor. In some embodiments, the inhibitor is a B7H4 inhibitor. In some embodiments, the inhibitor is a Vista inhibitor. In some embodiments, the inhibitor is a B-RAFi inhibitor. In some embodiments, the inhibitor is a MEKi inhibitor. In some embodiments, the inhibitor is a Btk inhibitor. In some embodiments, the inhibitor is ibrutinib. In some embodiments, the inhibitor is crizotinib. In some embodiments, the inhibitor is an IDO inhibitor. In some embodiments, the inhibitor is an α-CSFIR inhibitor. In some embodiments, the inhibitor is an α-CCR4 inhibitor. In some embodiments, the inhibitor is a TGF-beta. In some embodiments, the inhibitor is a myeloid-derived suppressor cell. In some embodiments, the inhibitor is a T-regulatory cell.

[0509] In some embodiments, the agonist is Ox40. In some embodiments, the agonist is GITR. In some embodiments, the agonist is CD137. In some embodiments, the agonist is ICOS. In some embodiments, the agonist is CD27. In some embodiments, the agonist is HVEM.

[0510] In some embodiments, the CD147 antibody, conjugated antibody, activatable antibody and/or conjugated activatable antibody is administered during and/or after treatment in combination with one or more additional agents such as, for example, a chemotherapeutic agent, an anti-inflammatory agent, and/or a an immunosuppressive agent. In some embodiments, the CD147 antibody, conjugated CD147 antibody, activatable CD147 antibody and/or conjugated activatable CD147 antibody and the additional agent are formulated into a single therapeutic composition, and the CD147 antibody, conjugated CD147 antibody, activatable CD147 antibody and/or conjugated activatable CD147 antibody and additional agent are administered simultaneously. Alternatively, the CD147 antibody, conjugated CD147 antibody, activatable CD147 antibody and/or conjugated activatable CD147 antibody and additional agent are separate from each other, e.g., each is formulated into a separate therapeutic composition, and the CD147 antibody, conjugated CD147 antibody, activatable CD147 antibody and/or conjugated activatable CD147 antibody and the additional agent are administered simultaneously, or the CD147 antibody, conjugated CD147 antibody, activatable CD147 antibody and/or conjugated activatable CD147 antibody and the additional agent are administered at different times during a treatment regimen. For example, the CD147 antibody, conjugated CD147 antibody, activatable CD147 antibody and/or conjugated activatable CD147 antibody is administered prior to the administration of the additional agent, the CD147 antibody, conjugated CD147 antibody, activatable CD147 antibody and/or conjugated activatable CD147 antibody is administered subsequent to the administration of the additional agent, or the CD147 antibody, conjugated CD147 antibody, activatable CD147 antibody and/or conjugated activatable CD147 antibody and the additional agent are administered in an alternating fashion. As described herein, the CD147 antibody, conjugated CD147 antibody, activatable CD147 antibody and/or conjugated activatable CD147 antibody and additional agent are administered in single doses or in multiple doses.

[0511] In some embodiments, the CD147 antibody, conjugated CD147 antibody, activatable CD147 antibody and/or conjugated activatable CD147 antibody and the additional agent(s) are administered simultaneously. For example, the CD147 antibody, conjugated CD147 antibody, activatable CD147 antibody and/or conjugated activatable CD147 antibody and the additional agent(s) can be formulated in a single composition or administered as two or more separate compositions. In some embodiments, the CD147 antibody, conjugated CD147 antibody, activatable CD147 antibody and/or conjugated activatable CD147 antibody and the additional agent(s) are administered sequentially, or the CD147 antibody, conjugated CD147 antibody, activatable CD147 antibody and/or conjugated activatable CD147 antibody and the additional agent are administered at different times during a treatment regimen.

[0512] In some embodiments, the CD147 antibody, conjugated CD147 antibody, activatable CD147 antibody and/or conjugated activatable CD147 antibody is administered during and/or after treatment in combination with one or more additional agents such as, by way of non-limiting example, a chemotherapeutic agent, an anti-inflammatory agent, and/or an immunosuppressive agent, such as an alkylating agent, an anti-metabolite, an anti-microtubule agent, a topoisomerase inhibitor, a cytotoxic antibiotic, and/or any other nucleic acid damaging agent. In some embodiments, the additional agent is a taxane, such as paclitaxel (e.g., Abraxane®). In some embodiments, the additional agent is an anti-metabolite, such as gemcitabine. In some embodiments, the additional agent is an alkylating agent, such as platinum-based chemotherapy, such as carboplatin or cisplatin. In some embodiments, the additional agent is a targeted agent, such as a kinase inhibitor, e.g., sorafenib or erlotinib. In some embodiments, the additional agent is a targeted agent, such as another antibody, e.g., a monoclonal antibody (e.g., bevacizumab), a bispecific antibody, or a multispecific antibody. In some embodiments, the additional agent is a proteosome inhibitor, such as bortezomib or carfilzomib. In some embodiments, the additional agent is an immune modulating agent, such as lenolidominde or IL-2. In some embodiments, the additional agent is radiation. In some embodiments, the additional agent is an agent considered standard of care by those skilled in the art. In some embodiments, the additional agent is a chemotherapeutic agent well known to those skilled in the art.

[0513] In some embodiments, the additional agent is another antibody or antigen-binding fragment thereof, another conjugated antibody or antigen-binding fragment thereof, another activatable antibody or antigen-binding fragment thereof and/or another conjugated activatable antibody or antigen-binding fragment thereof. In some embodiments the additional agent is another antibody or antigen-binding fragment thereof, another conjugated antibody or antigen-binding fragment thereof, another activatable antibody or antigen-binding fragment thereof and/or another conjugated activatable antibody or antigen-binding fragment thereof against the same target as the first antibody or antigen-binding fragment thereof, the first conjugated antibody or antigen-binding fragment thereof, activatable antibody or antigen-binding fragment thereof and/or a conjugated activatable antibody or antigen-binding fragment thereof, e.g., against CD147. In some embodiments the additional agent is another antibody or antigen-binding fragment thereof, another conjugated antibody or antigen-binding fragment thereof, another activatable antibody or antigen-binding fragment thereof and/or another conjugated activatable antibody or antigen-binding fragment thereof against a target different than the target of the first antibody or antigen-binding fragment thereof, the first conjugated antibody or antigen-binding fragment thereof, activatable antibody or antigen-binding fragment thereof and/or a conjugated activatable antibody or antigen-binding fragment thereof.

[0514] As a non-limiting example, the antibody, antigen-binding fragment and/or the AB of an activatable antibody (of the additional agent) is a binding partner for any target listed in Table 10.

TABLE 10
Exemplary Targets

| | | | | | |
|---|---|---|---|---|---|
| 1-92-LFA-3 | CD52 | DL44 | HVEM | LIF-R | STEAP1 |
| Alpha-4 | CD56 | DLK1 | Hyaluronidase | Lewis X | STEAP2 |
| integrin | | | | | |
| Alpha-V | CD64 | DLL4 | ICOS | LIGHT | TAG-72 |
| integrin | | | | | |
| alpha4beta1 | CD70 | DPP-4 | IFNalpha | LRP4 | TAPA1 |
| integrin | | | | | |
| alpha4beta7 | CD147 | DSG1 | IFNbeta | LRRC26 | TGFbeta |
| integrin | | | | | |
| AGR2 | CD74 | EGFR | IFNgamma | MCSP | TIGIT |
| Anti-Lewis-Y | | EGFRviii | IgE | Mesothelin | TIM-3 |
| Apelin J | CD80 | Endothelin B | IgE Receptor | MRP4 | TLR2 |
| receptor | | receptor | (FceRI) | | |
| | | (ETBR) | | | |
| APRIL | CD81 | ENPP3 | IGF | MUC1 | TLR4 |
| B7-H4 | CD86 | EpCAM | IGF1R | Mucin-16 | TLR6 |
| | | | | (MUC16, | |
| | | | | CA-125) | |
| BAFF | CD95 | EPHA2 | IL1B | Na/K ATPase | TLR7 |
| BTLA | CD117 | EPHB2 | IL1R | Neutrophil | TLR8 |
| | | | | elastase | |
| C5 | CD125 | ERBB3 | IL2 | NGF | TLR9 |
| complement | | | | | |
| C-242 | CD132 | F protein of | IL11 | Nicastrin | TMEM31 |
| | (IL-2RG) | RSV | | | |
| CA9 | CD133 | FAP | IL12 | Notch | TNFalpha |
| | | | | Receptors | |
| CA19-9 | CD137 | FGF-2 | IL12p40 | Notch1 | TNFR |
| (Lewis a) | | | | | |
| Carbonic | CD138 | FGF8 | IL-12R, | Notch 2 | TNFRS12 |
| anhydrase 9 | | | IL-12Rbeta1 | | A |
| CD2 | CD166 | FGFR1 | IL13 | Notch 3 | TRAIL-R1 |
| CD3 | CD172A | FGFR2 | IL13R | Notch 4 | TRAIL-R2 |
| CD6 | CD248 | FGFR3 | IL15 | NOV | Transferrin |
| CD9 | CDH6 | FGFR4 | IL17 | OSM-R | Transferrin |
| | | | | | receptor |
| CD11a | CEACAM5 | Folate | IL18 | OX-40 | TRK-A |
| | (CEA) | receptor | | | |
| CD19 | CEACAM6 | GAL3ST1 | IL21 | PAR2 | TRK-B |
| | (NCA-90) | | | | |
| CD20 | CLAUDIN-3 | G-CSF | IL23 | PDGF-AA | uPAR |
| CD22 | CLAUDIN-4 | G-CSFR | IL23R | PDGF-BB | VAP1 |
| CD24 | cMet | GD2 | IL27/IL27R | PDGFRalpha | VCAM-1 |
| | | | (wsx1) | | |
| CD25 | Collagen | GITR | IL29 | PDGFRbeta | VEGF |
| CD27 | Cripto | GLUT1 | IL-31R | PD-1 | VEGF-A |
| CD28 | CSFR | GLUT4 | IL31/IL31R | PD-L1 | VEGF-B |
| CD30 | CSFR-1 | GM-CSF | IL2R | PD-L2 | VEGF-C |
| CD33 | CTLA-4 | GM-CSFR | IL4 | Phosphatidyl- | VEGF-D |
| | | | | serine | |
| CD38 | CTGF | GP IIb/IIIa | IL4R | P1GF | VEGFR1 |
| | | receptors | | | |
| CD40 | CXCL10 | Gp130 | IL6, IL6R | PSCA | VEGFR2 |
| CD40L | CXCL13 | GPIIB/IIIA | Insulin | PSMA | VEGFR3 |
| | | | Receptor | | |
| CD41 | CXCR1 | GPNMB | Jagged | RAAG12 | VISTA |
| | | | Ligands | | |
| CD44 | CXCR2 | GRP78 | Jagged 1 | RAGE | WISP-1 |
| CD44v6 | | HER2/neu | Jagged 2 | SLC44A4 | WISP-2 |
| CD47 | CXCR4 | HGF | LAG-3 | Sphingosine 1 | WISP-3 |
| | | | | Phosphate | |
| CD51 | CYR61 | hGH | | | |

[0515] As a non-limiting example, the antibody, antigen-binding fragment and/or the AB of an activatable antibody (of the additional agent) is or is derived from an antibody listed in Table 11.

TABLE 11
Exemplary sources for Abs

| Antibody Trade Name (antibody name) | Target |
|---|---|
| Avastin ™ (bevacizumab) | VEGF |
| Lucentis ™ (ranibizumab) | VEGF |
| Erbitux ™ (cetuximab) | EGFR |
| Vectibix ™ (panitumumab) | EGFR |
| Remicade ™ (infliximab) | TNFα |
| Humira ™ (adalimumab) | TNFα |
| Tysabri ™ (natalizumab) | Integrinα4 |
| Simulect ™ (basiliximab) | IL2R |
| Soliris ™ (eculizumab) | Complement C5 |
| Raptiva ™ (efalizumab) | CD11a |
| Bexxar ™ (tositumomab) | CD20 |
| Zevalin ™ (ibritumomab tiuxetan) | CD20 |
| Rituxan ™ (rituximab) | CD20 |
| Ocrelizumab | CD20 |
| Arzerra ™ (ofatumumab) | CD20 |
| Gazyva ™ (obinutuzumab) | CD20 |
| Zenapax ™ (daclizumab) | CD25 |
| Adcetris ™ (brentuximab vedotin) | CD30 |
| Myelotarg ™ (gemtuzumab) | CD33 |
| Mylotarg ™ (gemtuzumab ozogamicin) | CD33 |
| Campath ™ (alemtuzumab) | CD52 |
| ReoPro ™ (abiciximab) | Glycoprotein receptor IIb/IIIa |
| Xolair ™ (omalizumab) | IgE |
| Herceptin ™ (trastuzumab) | Her2 |
| Kadcyla ™ (trastuzumab emtansine) | Her2 |
| Synagis ™ (palivizumab) | F protein of RSV |
| (ipilimumab) | CTLA-4 |
| (tremelimumab) | CTLA-4 |
| Hu5c8 | CD40L |
| (pertuzumab) | Her2-neu |
| (ertumaxomab) | CD3/Her2-neu |
| Orencia ™ (abatacept) | CTLA-4 |
| (tanezumab) | NGF |
| (bavituximab) | Phosphatidylserine |
| (zalutumumab) | EGFR |
| (mapatumumab) | EGFR |
| (matuzumab) | EGFR |
| (nimotuzumab) | EGFR |
| ICR62 | EGFR |
| mAb 528 | EGFR |
| CH806 | EGFR |
| MDX-447 | EGFR/CD64 |
| (edrecolomab) | EpCAM |
| RAV12 | RAAG12 |
| huJ591 | PSMA |
| Enbrel ™ (etanercept) | TNF-R |
| Amevive ™ (alefacept) | 1-92-LFA-3 |
| Antril ™ , Kineret ™ (ankinra) | IL-1Ra |
| GC1008 | TGFbeta |
| | Notch, e.g., Notch 1 |
| | Jagged 1 or Jagged 2 |
| (adecatumumab) | EpCAM |
| (figitumumab) | IGF1R |
| (tocilizumab) | IL-6 receptor |
| Stelara ™ (ustekinumab) | IL-12/IL-23 |
| Prolia ™ (denosumab) | RANKL |

[0516] In some embodiments, the additional antibody or antigen binding fragment thereof, conjugated antibody or antigen binding fragment thereof, activatable antibody or antigen binding fragment thereof, and/or conjugated activatable antibody or antigen binding fragment thereof is a monoclonal antibody, domain antibody, single chain, Fab fragment, a F(ab′)₂ fragment, a scFv, a scAb, a dAb, a single domain heavy chain antibody, or a single domain light chain antibody. In some embodiments, the additional antibody or antigen binding fragment thereof, conjugated antibody or antigen binding fragment thereof, activatable antibody or antigen binding fragment thereof, and/or conjugated activatable antibody or antigen binding fragment thereof is a mouse, other rodent, chimeric, humanized or fully human monoclonal antibody.

[0517] Detection, Diagnostics, Imaging, Patient Selection

[0518] The invention also provides methods and kits for using the antibodies/conjugated antibodies/activatable antibodies/conjugated activatable antibodies provided herein in a variety of diagnostic and/or prophylactic indications. For example, the invention provides methods and kits for detecting the presence or absence of a cleaving agent and a target of interest in a subject or a sample by (i) contacting a subject or sample with a CD147 activatable antibody, wherein the CD147 activatable antibody comprises a masking moiety (MM), a cleavable moiety (CM) that is cleaved by the cleaving agent, and an antigen binding domain or fragment thereof (AB) that specifically binds the target of interest, wherein the CD147 activatable antibody in an uncleaved, non-activated state comprises a structural arrangement from N-terminus to C-terminus as follows: MM-CM-AB or AB-CM-MM; (a) wherein the MM is a peptide that inhibits binding of the AB to CD147, and wherein the MM does not have an amino acid sequence of a naturally occurring binding partner of the AB and is not a modified form of a natural binding partner of the AB, and (b) wherein, when the AB is in an uncleaved, non-activated state, the MM interferes with specific binding of the AB to CD147, and when the AB is in a cleaved, activated state the MM does not interfere or compete with specific binding of the AB to CD147; and (ii) measuring a level of activated CD147 activatable antibody in the subject or sample, wherein a detectable level of activated CD147 activatable antibody in the subject or sample indicates that the cleaving agent and CD147 are present in the subject or sample and wherein no detectable level of activated CD147 activatable antibody in the subject or sample indicates that the cleaving agent, CD147 or both the cleaving agent and CD147 are absent in the subject or sample. As provided herein, the CD147 activatable antibody can bind both human and cynomolgus CD147.

[0519] In some embodiments, the activatable CD147 antibody is an activatable CD147 antibody to which a therapeutic agent is conjugated. In some embodiments, the activatable antibody is not conjugated to an agent. In some embodiments, the activatable CD147 antibody comprises a detectable label. In some embodiments, the detectable label is positioned on the AB. In some embodiments, measuring the level of activatable antibody in the subject or sample is accomplished using a secondary reagent that specifically binds to the activated antibody, wherein the reagent comprises a detectable label. In some embodiments, the secondary reagent is an antibody comprising a detectable label.

[0520] In some embodiments of these methods and kits, the activatable CD147 antibody includes a detectable label. In some embodiments of these methods and kits, the detectable label includes an imaging agent, a contrasting agent, an enzyme, a fluorescent label, a chromophore, a dye, one or more metal ions, or a ligand-based label. In some embodiments of these methods and kits, the imaging agent comprises a radioisotope. In some embodiments of these methods and kits, the radioisotope is indium or technetium. In some embodiments of these methods and kits, the contrasting agent comprises iodine, gadolinium or iron oxide. In some embodiments of these methods and kits, the enzyme comprises horseradish peroxidase, alkaline phosphatase, or β-galactosidase. In some embodiments of these methods and kits, the fluorescent label comprises yellow fluorescent protein (YFP), cyan fluorescent protein (CFP), green fluorescent protein (GFP), modified red fluorescent protein (mRFP), red fluorescent protein tdimer2 (RFP tdimer2), HCRED, or a europium derivative. In some embodiments of these methods and kits, the luminescent label comprises an N-methylacrydium derivative. In some embodiments of these methods, the label comprises an Alexa Fluor® label, such as Alex Fluor® 680 or Alexa Fluor® 750. In some embodiments of these methods and kits, the ligand-based label comprises biotin, avidin, streptavidin or one or more haptens.

[0521] In some embodiments of these methods and kits, the subject is a mammal. In some embodiments of these methods, the subject is a human. In some embodiments, the subject is a non-human mammal, such as a non-human primate, companion animal (e.g., cat, dog, horse), farm animal, work animal, or zoo animal. In some embodiments, the subject is a rodent.

[0522] In some embodiments of these methods and kits, the method is an in vivo method. In some embodiments of these methods, the method is an int situ method. In some embodiments of these methods, the method is an ex vivo method. In some embodiments of these methods, the method is an in vitro method.

[0523] In some embodiments of the methods and kits, the method is used to identify or otherwise refine a patient population suitable for treatment with a CD147 activatable antibody of the disclosure, followed by treatment by administering that activatable CD147 antibody and/or conjugated activatable CD147 antibody to a subject in need thereof. For example, patients that test positive for both the target (e.g., CD147) and a protease that cleaves the substrate in the cleavable moiety (CM) of CD147 activatable antibody being tested in these methods are identified as suitable candidates for treatment with such a CD147 activatable antibody comprising such a CM, and the patient is then administered a therapeutically effective amount of the activatable CD147 antibody and/or conjugated activatable CD147 antibody that was tested. Likewise, patients that test negative for either or both of the target (e.g., CD147) and the protease that cleaves the substrate in the CM in the activatable antibody being tested using these methods might be identified as suitable candidates for another form of therapy. In some embodiments, such patients can be tested with other CD147 activatable antibodies until a suitable CD147 activatable antibody for treatment is identified (e.g., a CD147 activatable antibody comprising a CM that is cleaved by the patient at the site of disease). In some embodiments, the patient is then administered a therapeutically effective amount of the activatable CD147 antibody and/or conjugated for which the patient tested positive. Suitable AB, MM, and/or CM include any of the AB, MM, and/or CM disclosed herein.

[0524] In some embodiments, the antibody, the conjugated antibody, activatable antibody and/or conjugated activatable antibody contains a detectable label. An intact antibody, or a fragment thereof (e.g., Fab, scFv, or F(ab)₂) is used. The term “labeled”, with regard to the probe or antibody, is intended to encompass direct labeling of the probe or antibody by coupling (i.e., physically linking) a detectable substance to the probe or antibody, as well as indirect labeling of the probe or antibody by reactivity with another reagent that is directly labeled. Examples of indirect labeling include detection of a primary antibody using a fluorescently-labeled secondary antibody and end-labeling of a DNA probe with biotin such that it can be detected with fluorescently-labeled streptavidin. The term “biological sample” is intended to include tissues, cells and biological fluids isolated from a subject, as well as tissues, cells and fluids present within a subject. Included within the usage of the term “biological sample”, therefore, is blood and a fraction or component of blood including blood serum, blood plasma, or lymph. That is, the detection method of the disclosure can be used to detect an analyte mRNA, protein, or genomic DNA in a biological sample in vitro as well as in vivo. For example, in vitro techniques for detection of an analyte mRNA include Northern hybridizations and in situ hybridizations. In vitro techniques for detection of an analyte protein include enzyme linked immunosorbent assays (ELISAs), Western blots, immunoprecipitations, immunochemical staining, and immunofluorescence. In vitro techniques for detection of an analyte genomic DNA include Southern hybridizations. Procedures for conducting immunoassays are described, for example in “ELISA: Theory and Practice: Methods in Molecular Biology”, Vol. 42, J. R. Crowther (Ed.) Human Press, Totowa, N.J., 1995; “Immunoassay”, E. Diamandis and T. Christopoulus, Academic Press, Inc., San Diego, Calif., 1996; and “Practice and Theory of Enzyme Immunoassays”, P. Tijssen, Elsevier Science Publishers, Amsterdam, 1985. Furthermore, in vivo techniques for detection of an analyte protein include introducing into a subject a labeled anti-analyte protein antibody. For example, the antibody can be labeled with a radioactive marker whose presence and location in a subject can be detected by standard imaging techniques.

[0525] The antibodies, conjugated antibodies, activatable antibodies and/or conjugated activatable antibodies of the disclosure are also useful in a variety of diagnostic and prophylactic formulations. In one embodiment, an antibody, a conjugated antibody, an activatable antibody and/or a conjugated activatable antibody is administered to patients that are at risk of developing one or more of the aforementioned disorders. A patient's or organ's predisposition to one or more of the aforementioned disorders can be determined using genotypic, serological or biochemical markers.

[0526] In some embodiments of the disclosure, an antibody, a conjugated antibody, an activatable antibody and/or a conjugated activatable antibody is administered to human individuals diagnosed with a clinical indication associated with one or more of the aforementioned disorders. Upon diagnosis, an antibody, a conjugated antibody, an activatable antibody and/or a conjugated activatable antibody is administered to mitigate or reverse the effects of the clinical indication.

[0527] An antibody, a conjugated antibody, an activatable antibody, and/or a conjugated activatable antibody of the disclosure is also useful in the detection of a target in patient samples and accordingly are useful as diagnostics. For example, the antibodies and/or activatable antibodies, and conjugated versions thereof, of the disclosure are used in in vitro assays, e.g., ELISA, to detect target levels in a patient sample.

[0528] In one embodiment, an antibody, a conjugated antibody, an activatable antibody and/or a conjugated activatable antibody of the disclosure is immobilized on a solid support (e.g., the well(s) of a microtiter plate). The immobilized antibody, conjugated antibody, activatable antibody and/or conjugated activatable antibody serves as a capture antibody for any target that may be present in a test sample. Prior to contacting the immobilized antibody and/or activatable antibody, and/or conjugated versions thereof, with a patient sample, the solid support is rinsed and treated with a blocking agent such as milk protein or albumin to prevent nonspecific adsorption of the analyte.

[0529] Subsequently the wells are treated with a test sample suspected of containing the antigen, or with a solution containing a standard amount of the antigen. Such a sample is, e.g., a serum sample from a subject suspected of having levels of circulating antigen considered to be diagnostic of a pathology. After rinsing away the test sample or standard, the solid support is treated with a second antibody that is detectably labeled. The labeled second antibody serves as a detecting antibody. The level of detectable label is measured, and the concentration of target antigen in the test sample is determined by comparison with a standard curve developed from the standard samples.

[0530] It will be appreciated that based on the results obtained using the antibodies and activatable antibodies of the disclosure, and conjugated versions thereof, in an in vitro diagnostic assay, it is possible to stage a disease in a subject based on expression levels of the target antigen. For a given disease, samples of blood are taken from subjects diagnosed as being at various stages in the progression of the disease, and/or at various points in the therapeutic treatment of the disease. Using a population of samples that provides statistically significant results for each stage of progression or therapy, a range of concentrations of the antigen that may be considered characteristic of each stage is designated.

[0531] An antibody, a conjugated antibody, an activatable antibody and/or a conjugated activatable antibody can also be used in diagnostic and/or imaging methods. In some embodiments, such methods are in vitro methods. In some embodiments, such methods are in vivo methods. In some embodiments, such methods are in situ methods. In some embodiments, such methods are ex vivo methods. For example, activatable antibodies having an enzymatically cleavable CM can be used to detect the presence or absence of an enzyme that is capable of cleaving the CM. Such activatable antibodies can be used in diagnostics, which can include in vivo detection (e.g., qualitative or quantitative) of enzyme activity (or, in some embodiments, an environment of increased reduction potential such as that which can provide for reduction of a disulfide bond) through measured accumulation of activated antibodies (i.e., antibodies resulting from cleavage of an activatable antibody) in a given cell or tissue of a given host organism. Such accumulation of activated antibodies indicates not only that the tissue expresses enzymatic activity (or an increased reduction potential depending on the nature of the CM) but also that the tissue expresses target to which the activated antibody binds.

[0532] For example, the CM can be selected to be substrate for at least one protease found at the site of a tumor, at the site of a viral or bacterial infection at a biologically confined site (e.g., such as in an abscess, in an organ, and the like), and the like. The AB can be one that binds a target antigen. Using methods as disclosed herein, or when appropriate, methods familiar to one skilled in the art, a detectable label (e.g., a fluorescent label or radioactive label or radiotracer) can be conjugated to an AB or other region of an antibody and/or activatable antibody. Suitable detectable labels are discussed in the context of the above screening methods and additional specific examples are provided below. Using an AB specific to a protein or peptide of the disease state, along with at least one protease whose activity is elevated in the disease tissue of interest, activatable antibodies will exhibit an increased rate of binding to disease tissue relative to tissues where the CM specific enzyme is not present at a detectable level or is present at a lower level than in disease tissue or is inactive (e.g., in zymogen form or in complex with an inhibitor). Since small proteins and peptides are rapidly cleared from the blood by the renal filtration system, and because the enzyme specific for the CM is not present at a detectable level (or is present at lower levels in non-disease tissues or is present in inactive conformation), accumulation of activated antibodies in the disease tissue is enhanced relative to non-disease tissues.

[0533] In another example, activatable antibodies can be used to detect the presence or absence of a cleaving agent in a sample. For example, where the activatable antibodies contain a CM susceptible to cleavage by an enzyme, the activatable antibodies can be used to detect (either qualitatively or quantitatively) the presence of an enzyme in the sample. In another example, where the activatable antibodies contain a CM susceptible to cleavage by reducing agent, the activatable antibodies can be used to detect (either qualitatively or quantitatively) the presence of reducing conditions in a sample. To facilitate analysis in these methods, the activatable antibodies can be detectably labeled, and can be bound to a support (e.g., a solid support, such as a slide or bead). The detectable label can be positioned on a portion of the activatable antibody that is not released following cleavage, for example, the detectable label can be a quenched fluorescent label or other label that is not detectable until cleavage has occurred. The assay can be conducted by, for example, contacting the immobilized, detectably labeled activatable antibodies with a sample suspected of containing an enzyme and/or reducing agent for a time sufficient for cleavage to occur, then washing to remove excess sample and contaminants. The presence or absence of the cleaving agent (e.g., enzyme or reducing agent) in the sample is then assessed by a change in detectable signal of the activatable antibodies prior to contacting with the sample e.g., the presence of and/or an increase in detectable signal due to cleavage of the activatable antibody by the cleaving agent in the sample.

[0534] Such detection methods can be adapted to also provide for detection of the presence or absence of a target that is capable of binding the AB of the activatable antibodies when cleaved. Thus, the assays can be adapted to assess the presence or absence of a cleaving agent and the presence or absence of a target of interest. The presence or absence of the cleaving agent can be detected by the presence of and/or an increase in detectable label of the activatable antibodies as described above, and the presence or absence of the target can be detected by detection of a target-AB complex e.g., by use of a detectably labeled anti-target antibody.

[0535] Activatable antibodies are also useful in in situ imaging for the validation of activatable antibody activation, e.g., by protease cleavage, and binding to a particular target. In situ imaging is a technique that enables localization of proteolytic activity and target in biological samples such as cell cultures or tissue sections. Using this technique, it is possible to confirm both binding to a given target and proteolytic activity based on the presence of a detectable label (e.g., a fluorescent label).

[0536] These techniques are useful with any frozen cells or tissue derived from a disease site (e.g. tumor tissue) or healthy tissues. These techniques are also useful with fresh cell or tissue samples.

[0537] In these techniques, an activatable antibody is labeled with a detectable label. The detectable label can be a fluorescent dye, (e.g. a fluorophore, Fluorescein Isothiocyanate (FITC), Rhodamine Isothiocyanate (TRITC), an Alexa Fluor@ label), a near infrared (NIR) dye (e.g., Qdot® nanocrystals), a colloidal metal, a hapten, a radioactive marker, biotin and an amplification reagent such as streptavidin, or an enzyme (e.g. horseradish peroxidase or alkaline phosphatase).

[0538] Detection of the label in a sample that has been incubated with the labeled, activatable antibody indicates that the sample contains the target and contains a protease that is specific for the CM of the activatable antibody. In some embodiments, the presence of the protease can be confirmed using broad spectrum protease inhibitors such as those described herein, and/or by using an agent that is specific for the protease, for example, an antibody such as A11, which is specific for the protease matriptase and inhibits the proteolytic activity of matriptase; see e.g., International Publication Number WO 2010/129609, published 11 Nov. 2010. The same approach of using broad spectrum protease inhibitors such as those described herein, and/or by using a more selective inhibitory agent can be used to identify a protease that is specific for the CM of the activatable antibody. In some embodiments, the presence of the target can be confirmed using an agent that is specific for the target, e.g., another antibody, or the detectable label can be competed with unlabeled target. In some embodiments, unlabeled activatable antibody could be used, with detection by a labeled secondary antibody or more complex detection system.

[0539] Similar techniques are also useful for in vivo imaging where detection of the fluorescent signal in a subject, e.g., a mammal, including a human, indicates that the disease site contains the target and contains a protease that is specific for the CM of the activatable antibody.

[0540] These techniques are also useful in kits and/or as reagents for the detection, identification or characterization of protease activity in a variety of cells, tissues, and organisms based on the protease-specific CM in the activatable antibody.

[0541] The disclosure provides methods of using the antibodies and/or activatable antibodies in a variety of diagnostic and/or prophylactic indications. For example, the disclosure provides methods of detecting presence or absence of a cleaving agent and a target of interest in a subject or a sample by (i) contacting a subject or sample with an activatable antibody, wherein the activatable antibody comprises a masking moiety (MM), a cleavable moiety (CM) that is cleaved by the cleaving agent, e.g., a protease, and an antigen binding domain or fragment thereof (AB) that specifically binds the target of interest, wherein the activatable antibody in an uncleaved, non-activated state comprises a structural arrangement from N-terminus to C-terminus as follows: MM-CM-AB or AB-CM-MM; (a) wherein the MM is a peptide that inhibits binding of the AB to the target, and wherein the MM does not have an amino acid sequence of a naturally occurring binding partner of the AB and is not a modified form of a natural binding partner of the AB, and (b) wherein, in an uncleaved, non-activated state, the MM interferes with specific binding of the AB to the target, and in a cleaved, activated state the MM does not interfere or compete with specific binding of the AB to the target; and (ii) measuring a level of activated activatable antibody in the subject or sample, wherein a detectable level of activated activatable antibody in the subject or sample indicates that the cleaving agent and the target are present in the subject or sample and wherein no detectable level of activated activatable antibody in the subject or sample indicates that the cleaving agent, the target or both the cleaving agent and the target are absent and/or not sufficiently present in the subject or sample. In some embodiments, the activatable antibody is an activatable antibody to which a therapeutic agent is conjugated. In some embodiments, the activatable antibody is not conjugated to an agent. In some embodiments, the activatable antibody comprises a detectable label. In some embodiments, the detectable label is positioned on the AB. In some embodiments, measuring the level of activatable antibody in the subject or sample is accomplished using a secondary reagent that specifically binds to the activated antibody, wherein the reagent comprises a detectable label. In some embodiments, the secondary reagent is an antibody comprising a detectable label.

[0542] The disclosure also provides methods of detecting presence or absence of a cleaving agent in a subject or a sample by (i) contacting a subject or sample with an activatable antibody in the presence of a target of interest, e.g., the target, wherein the activatable antibody comprises a masking moiety (MM), a cleavable moiety (CM) that is cleaved by the cleaving agent, e.g., a protease, and an antigen binding domain or fragment thereof (AB) that specifically binds the target of interest, wherein the activatable antibody in an uncleaved, non-activated state comprises a structural arrangement from N-terminus to C-terminus as follows: MM-CM-AB or AB-CM-MM; (a) wherein the MM is a peptide that inhibits binding of the AB to the target, and wherein the MM does not have an amino acid sequence of a naturally occurring binding partner of the AB and is not a modified form of a natural binding partner of the AB; and (b) wherein, in an uncleaved, non-activated state, the MM interferes with specific binding of the AB to the target, and in a cleaved, activated state the MM does not interfere or compete with specific binding of the AB to the target; and (ii) measuring a level of activated activatable antibody in the subject or sample, wherein a detectable level of activated activatable antibody in the subject or sample indicates that the cleaving agent is present in the subject or sample and wherein no detectable level of activated activatable antibody in the subject or sample indicates that the cleaving agent is absent and/or not sufficiently present in the subject or sample. In some embodiments, the activatable antibody is an activatable antibody to which a therapeutic agent is conjugated. In some embodiments, the activatable antibody is not conjugated to an agent. In some embodiments, the activatable antibody comprises a detectable label. In some embodiments, the detectable label is positioned on the AB. In some embodiments, measuring the level of activatable antibody in the subject or sample is accomplished using a secondary reagent that specifically binds to the activated antibody, wherein the reagent comprises a detectable label. In some embodiments, the secondary reagent is an antibody comprising a detectable label.

[0543] The disclosure also provides kits for use in methods of detecting presence or absence of a cleaving agent and the target in a subject or a sample, where the kits include at least an activatable antibody comprises a masking moiety (MM), a cleavable moiety (CM) that is cleaved by the cleaving agent, e.g., a protease, and an antigen binding domain or fragment thereof (AB) that specifically binds the target of interest, wherein the activatable antibody in an uncleaved, non-activated state comprises a structural arrangement from N-terminus to C-terminus as follows: MM-CM-AB or AB-CM-MM; (a) wherein the MM is a peptide that inhibits binding of the AB to the target, and wherein the MM does not have an amino acid sequence of a naturally occurring binding partner of the AB and is not a modified form of a natural binding partner of the AB; and (b) wherein, in an uncleaved, non-activated state, the MM interferes with specific binding of the AB to the target, and in a cleaved, activated state the MM does not interfere or compete with specific binding of the AB to the target; and (ii) measuring a level of activated activatable antibody in the subject or sample, wherein a detectable level of activated activatable antibody in the subject or sample indicates that the cleaving agent is present in the subject or sample and wherein no detectable level of activated activatable antibody in the subject or sample indicates that the cleaving agent is absent and/or not sufficiently present in the subject or sample. In some embodiments, the activatable antibody is an activatable antibody to which a therapeutic agent is conjugated. In some embodiments, the activatable antibody is not conjugated to an agent. In some embodiments, the activatable antibody comprises a detectable label. In some embodiments, the detectable label is positioned on the AB. In some embodiments, measuring the level of activatable antibody in the subject or sample is accomplished using a secondary reagent that specifically binds to the activated antibody, wherein the reagent comprises a detectable label. In some embodiments, the secondary reagent is an antibody comprising a detectable label.

[0544] The disclosure also provides methods of detecting presence or absence of a cleaving agent in a subject or a sample by (i) contacting a subject or sample with an activatable antibody, wherein the activatable antibody comprises a masking moiety (MM), a cleavable moiety (CM) that is cleaved by the cleaving agent, e.g., a protease, an antigen binding domain (AB) that specifically binds the target, and a detectable label, wherein the activatable antibody in an uncleaved, non-activated state comprises a structural arrangement from N-terminus to C-terminus as follows: MM-CM-AB or AB-CM-MM; wherein the MM is a peptide that inhibits binding of the AB to the target, and wherein the MM does not have an amino acid sequence of a naturally occurring binding partner of the AB and is not a modified form of a natural binding partner of the AB; wherein, in an uncleaved, non-activated state, the MM interferes with specific binding of the AB to the target, and in a cleaved, activated state the MM does not interfere or compete with specific binding of the AB to the target; and wherein the detectable label is positioned on a portion of the activatable antibody that is released following cleavage of the CM; and (ii) measuring a level of detectable label in the subject or sample, wherein a detectable level of the detectable label in the subject or sample indicates that the cleaving agent is absent and/or not sufficiently present in the subject or sample and wherein no detectable level of the detectable label in the subject or sample indicates that the cleaving agent is present in the subject or sample. In some embodiments, the activatable antibody is an activatable antibody to which a therapeutic agent is conjugated. In some embodiments, the activatable antibody is not conjugated to an agent. In some embodiments, the activatable antibody comprises a detectable label. In some embodiments, the detectable label is positioned on the AB. In some embodiments, measuring the level of activatable antibody in the subject or sample is accomplished using a secondary reagent that specifically binds to the activated antibody, wherein the reagent comprises a detectable label. In some embodiments, the secondary reagent is an antibody comprising a detectable label.

[0545] The disclosure also provides kits for use in methods of detecting presence or absence of a cleaving agent and the target in a subject or a sample, where the kits include at least an activatable antibody and/or conjugated activatable antibody (e.g., an activatable antibody to which a therapeutic agent is conjugated) described herein for use in contacting a subject or biological sample and means for detecting the level of activated activatable antibody and/or conjugated activatable antibody in the subject or biological sample, wherein a detectable level of activated activatable antibody in the subject or biological sample indicates that the cleaving agent and the target are present in the subject or biological sample and wherein no detectable level of activated activatable antibody in the subject or biological sample indicates that the cleaving agent, the target or both the cleaving agent and the target are absent and/or not sufficiently present in the subject or biological sample, such that the target binding and/or protease cleavage of the activatable antibody cannot be detected in the subject or biological sample.

[0546] The disclosure also provides methods of detecting presence or absence of a cleaving agent in a subject or a sample by (i) contacting a subject or biological sample with an activatable antibody in the presence of the target, and (ii) measuring a level of activated activatable antibody in the subject or biological sample, wherein a detectable level of activated activatable antibody in the subject or biological sample indicates that the cleaving agent is present in the subject or biological sample and wherein no detectable level of activated activatable antibody in the subject or biological sample indicates that the cleaving agent is absent and/or not sufficiently present in the subject or biological sample at a detectable level, such that protease cleavage of the activatable antibody cannot be detected in the subject or biological sample. Such an activatable antibody includes a masking moiety (MM), a cleavable moiety (CM) that is cleaved by the cleaving agent, e.g., a protease, and an antigen binding domain or fragment thereof (AB) that specifically binds the target, wherein the activatable antibody in an uncleaved (i.e., non-activated) state comprises a structural arrangement from N-terminus to C-terminus as follows: MM-CM-AB or AB-CM-MM; (a) wherein the MM is a peptide that inhibits binding of the AB to the target, and wherein the MM does not have an amino acid sequence of a naturally occurring binding partner of the AB; and (b) wherein the MM of the activatable antibody in an uncleaved state interferes with specific binding of the AB to the target, and wherein the MM of an activatable antibody in a cleaved (i.e., activated) state does not interfere or compete with specific binding of the AB to the target. In some embodiments, the activatable antibody is an activatable antibody to which a therapeutic agent is conjugated. In some embodiments, the activatable antibody is not conjugated to an agent. In some embodiments, the detectable label is attached to the masking moiety. In some embodiments, the detectable label is attached to the cleavable moiety N-terminal to the protease cleavage site. In some embodiments, a single antigen binding site of the AB is masked. In some embodiments wherein an antibody of the disclosure has at least two antigen binding sites, at least one antigen binding site is masked and at least one antigen binding site is not masked. In some embodiments all antigen binding sites are masked. In some embodiments, the measuring step includes use of a secondary reagent comprising a detectable label.

[0547] The disclosure also provides kits for use in methods of detecting presence or absence of a cleaving agent and the target in a subject or a sample, where the kits include at least an activatable antibody and/or conjugated activatable antibody described herein for use in contacting a subject or biological sample with an activatable antibody in the presence of the target, and measuring a level of activated activatable antibody in the subject or biological sample, wherein a detectable level of activated activatable antibody in the subject or biological sample indicates that the cleaving agent is present in the subject or biological sample and wherein no detectable level of activated activatable antibody in the subject or biological sample indicates that the cleaving agent is absent and/or not sufficiently present in the subject or biological sample at a detectable level, such that protease cleavage of the activatable antibody cannot be detected in the subject or biological sample. Such an activatable antibody includes a masking moiety (MM), a cleavable moiety (CM) that is cleaved by the cleaving agent, e.g., a protease, and an antigen binding domain or fragment thereof (AB) that specifically binds the target, wherein the activatable antibody in an uncleaved (i.e., non-activated) state comprises a structural arrangement from N-terminus to C-terminus as follows: MM-CM-AB or AB-CM-MM; (a) wherein the MM is a peptide that inhibits binding of the AB to the target, and wherein the MM does not have an amino acid sequence of a naturally occurring binding partner of the AB; and (b) wherein the MM of the activatable antibody in an uncleaved state interferes with specific binding of the AB to the target, and wherein the MM of an activatable antibody in a cleaved (i.e., activated) state does not interfere or compete with specific binding of the AB to the target. In some embodiments, the activatable antibody is an activatable antibody to which a therapeutic agent is conjugated. In some embodiments, the activatable antibody is not conjugated to an agent. In some embodiments, the detectable label is attached to the masking moiety. In some embodiments, the detectable label is attached to the cleavable moiety N-terminal to the protease cleavage site. In some embodiments, a single antigen binding site of the AB is masked. In some embodiments wherein an antibody of the disclosure has at least two antigen binding sites, at least one antigen binding site is masked and at least one antigen binding site is not masked. In some embodiments all antigen binding sites are masked. In some embodiments, the measuring step includes use of a secondary reagent comprising a detectable label.

[0548] The disclosure also provides kits for use in methods of detecting presence or absence of a cleaving agent in a subject or a sample, where the kits include at least an activatable antibody and/or conjugated activatable antibody described herein for use in contacting a subject or biological sample and means for detecting the level of activated activatable antibody and/or conjugated activatable antibody in the subject or biological sample, wherein the activatable antibody includes a detectable label that is positioned on a portion of the activatable antibody that is released following cleavage of the CM, wherein a detectable level of activated activatable antibody in the subject or biological sample indicates that the cleaving agent is absent and/or not sufficiently present in the subject or biological sample such that the target binding and/or protease cleavage of the activatable antibody cannot be detected in the subject or biological sample, and wherein no detectable level of activated activatable antibody in the subject or biological sample indicates that the cleaving agent is present in the subject or biological sample at a detectable level.

[0549] The disclosure provides methods of detecting presence or absence of a cleaving agent and the target in a subject or a sample by (i) contacting a subject or biological sample with an activatable antibody, wherein the activatable antibody includes a detectable label that is positioned on a portion of the activatable antibody that is released following cleavage of the CM and (ii) measuring a level of activated activatable antibody in the subject or biological sample, wherein a detectable level of activated activatable antibody in the subject or biological sample indicates that the cleaving agent, the target or both the cleaving agent and the target are absent and/or not sufficiently present in the subject or biological sample, such that the target binding and/or protease cleavage of the activatable antibody cannot be detected in the subject or biological sample, and wherein a reduced detectable level of activated activatable antibody in the subject or biological sample indicates that the cleaving agent and the target are present in the subject or biological sample. A reduced level of detectable label is, for example, a reduction of about 5%, about 10%, about 15%, about 20%, about 25%, about 30%, about 35%, about 40%, about 45%, about 50%, about 55%, about 60%, about 65%, about 70%, about 75%, about 80%, about 85%, about 900, about 95% and/or about 100%. Such an activatable antibody includes a masking moiety (MM), a cleavable moiety (CM) that is cleaved by the cleaving agent, and an antigen binding domain or fragment thereof (AB) that specifically binds the target, wherein the activatable antibody in an uncleaved (i.e., non-activated) state comprises a structural arrangement from N-terminus to C-terminus as follows: MM-CM-AB or AB-CM-MM; (a) wherein the MM is a peptide that inhibits binding of the AB to the target, and wherein the MM does not have an amino acid sequence of a naturally occurring binding partner of the AB; and (b) wherein the MM of the activatable antibody in an uncleaved state interferes with specific binding of the AB to the target, and wherein the MM of an activatable antibody in a cleaved (i.e., activated) state does not interfere or compete with specific binding of the AB to the target. In some embodiments, the activatable antibody is an activatable antibody to which a therapeutic agent is conjugated. In some embodiments, the activatable antibody is not conjugated to an agent. In some embodiments, the activatable antibody comprises a detectable label. In some embodiments, the detectable label is positioned on the AB. In some embodiments, measuring the level of activatable antibody in the subject or sample is accomplished using a secondary reagent that specifically binds to the activated antibody, wherein the reagent comprises a detectable label. In some embodiments, the secondary reagent is an antibody comprising a detectable label.

[0550] The disclosure also provides kits for use in methods of detecting presence or absence of a cleaving agent and the target in a subject or a sample, where the kits include at least an activatable antibody and/or conjugated activatable antibody described herein for use in contacting a subject or biological sample and means for detecting the level of activated activatable antibody and/or conjugated activatable antibody in the subject or biological sample, wherein a detectable level of activated activatable antibody in the subject or biological sample indicates that the cleaving agent, the target or both the cleaving agent and the target are absent and/or not sufficiently present in the subject or biological sample, such that the target binding and/or protease cleavage of the activatable antibody cannot be detected in the subject or biological sample, and wherein a reduced detectable level of activated activatable antibody in the subject or biological sample indicates that the cleaving agent and the target are present in the subject or biological sample. A reduced level of detectable label is, for example, a reduction of about 5%, about 10%, about 15%, about 20%, about 25%, about 30%, about 35%, about 40%, about 45%, about 50%, about 55%, about 60%, about 65%, about 70%, about 75%, about 80%, about 85%, about 90%, about 95% and/or about 100%.

[0551] The disclosure also provides methods of detecting presence or absence of a cleaving agent in a subject or a sample by (i) contacting a subject or biological sample with an activatable antibody, wherein the activatable antibody includes a detectable label that is positioned on a portion of the activatable antibody that is released following cleavage of the CM; and (ii) measuring a level of detectable label in the subject or biological sample, wherein a detectable level of the detectable label in the subject or biological sample indicates that the cleaving agent is absent and/or not sufficiently present in the subject or biological sample at a detectable level, such that protease cleavage of the activatable antibody cannot be detected in the subject or biological sample, and wherein a reduced detectable level of the detectable label in the subject or biological sample indicates that the cleaving agent is present in the subject or biological sample. A reduced level of detectable label is, for example, a reduction of about 5%, about 10%, about 15%, about 20%, about 25%, about 30%, about 35%, about 40%, about 45%, about 50%, about 55%, about 60%, about 65%, about 70%, about 75%, about 80%, about 85%, about 900, about 95% and/or about 100%. Such an activatable antibody includes a masking moiety (MM), a cleavable moiety (CM) that is cleaved by the cleaving agent, and an antigen binding domain or fragment thereof (AB) that specifically binds the target, wherein the activatable antibody in an uncleaved (i.e., non-activated) state comprises a structural arrangement from N-terminus to C-terminus as follows: MM-CM-AB or AB-CM-MM; (a) wherein the MM is a peptide that inhibits binding of the AB to the target, and wherein the MM does not have an amino acid sequence of a naturally occurring binding partner of the AB; and (b) wherein the MM of the activatable antibody in an uncleaved state interferes with specific binding of the AB to the target, and wherein the MM of an activatable antibody in a cleaved (i.e., activated) state does not interfere or compete with specific binding of the AB to the target. In some embodiments, the activatable antibody is an activatable antibody to which a therapeutic agent is conjugated. In some embodiments, the activatable antibody is not conjugated to an agent. In some embodiments, the activatable antibody comprises a detectable label. In some embodiments, the detectable label is positioned on the AB. In some embodiments, measuring the level of activatable antibody in the subject or sample is accomplished using a secondary reagent that specifically binds to the activated antibody, wherein the reagent comprises a detectable label. In some embodiments, the secondary reagent is an antibody comprising a detectable label.

[0552] The disclosure also provides kits for use in methods of detecting presence or absence of a cleaving agent of interest in a subject or a sample, where the kits include at least an activatable antibody and/or conjugated activatable antibody described herein for use in contacting a subject or biological sample and means for detecting the level of activated activatable antibody and/or conjugated activatable antibody in the subject or biological sample, wherein the activatable antibody includes a detectable label that is positioned on a portion of the activatable antibody that is released following cleavage of the CM, wherein a detectable level of the detectable label in the subject or biological sample indicates that the cleaving agent, the target, or both the cleaving agent and the target are absent and/or not sufficiently present in the subject or biological sample, such that the target binding and/or protease cleavage of the activatable antibody cannot be detected in the subject or biological sample, and wherein a reduced detectable level of the detectable label in the subject or biological sample indicates that the cleaving agent and the target are present in the subject or biological sample. A reduced level of detectable label is, for example, a reduction of about 5%, about 10%, about 15%, about 20%, about 25%, about 30%, about 35%, about 40%, about 45%, about 50%, about 55%, about 60%, about 65%, about 70%, about 75%, about 80%, about 85%, about 90%, about 95% and/or about 100%.

[0553] In some embodiments of these methods and kits, the activatable antibody includes a detectable label. In some embodiments of these methods and kits, the detectable label includes an imaging agent, a contrasting agent, an enzyme, a fluorescent label, a chromophore, a dye, one or more metal ions, or a ligand-based label. In some embodiments of these methods and kits, the imaging agent comprises a radioisotope. In some embodiments of these methods and kits, the radioisotope is indium or technetium. In some embodiments of these methods and kits, the contrasting agent comprises iodine, gadolinium or iron oxide. In some embodiments of these methods and kits, the enzyme comprises horseradish peroxidase, alkaline phosphatase, or 3-galactosidase. In some embodiments of these methods and kits, the fluorescent label comprises yellow fluorescent protein (YFP), cyan fluorescent protein (CFP), green fluorescent protein (GFP), modified red fluorescent protein (mRFP), red fluorescent protein tdimer2 (RFP tdimer2), HCRED, or a europium derivative. In some embodiments of these methods and kits, the luminescent label comprises an N-methylacrydium derivative. In some embodiments of these methods, the label comprises an Alexa Fluor® label, such as Alex Fluor® 680 or Alexa Fluor® 750. In some embodiments of these methods and kits, the ligand-based label comprises biotin, avidin, streptavidin or one or more haptens.

[0554] In some embodiments of these methods, the method is an in vivo method. In some embodiments of these methods, the method is an in situ method. In some embodiments of these methods, the method is an ex vivo method. In some embodiments of these methods, the method is an in vitro method.

[0555] In some embodiments, in situ imaging and/or in vivo imaging are useful in methods to identify which patients to treat. For example, in in situ imaging, the activatable antibodies are used to screen patient samples to identify those patients having the appropriate protease(s) and target(s) at the appropriate location, e.g., at a tumor site.

[0556] In some embodiments in situ imaging is used to identify or otherwise refine a patient population suitable for treatment with an activatable antibody of the disclosure. For example, patients that test positive for both the target (e.g., the target) and a protease that cleaves the substrate in the cleavable moiety (CM) of the activatable antibody being tested (e.g., accumulate activated antibodies at the disease site) are identified as suitable candidates for treatment with such an activatable antibody comprising such a CM. Likewise, patients that test negative for either or both of the target (e.g., the target) and the protease that cleaves the substrate in the CM in the activatable antibody being tested using these methods might be identified as suitable candidates for another form of therapy. In some embodiments, such patients that test negative with respect to a first activatable antibody can be tested with other activatable antibodies comprising different CMs until a suitable activatable antibody for treatment is identified (e.g., an activatable antibody comprising a CM that is cleaved by the patient at the site of disease). In some embodiments, the patient is then administered a therapeutically effective amount of the activatable antibody for which the patient tested positive.

[0557] In some embodiments in vivo imaging is used to identify or otherwise refine a patient population suitable for treatment with an activatable antibody of the disclosure. For example, patients that test positive for both the target (e.g., the target) and a protease that cleaves the substrate in the cleavable moiety (CM) of the activatable antibody being tested (e.g., accumulate activated antibodies at the disease site) are identified as suitable candidates for treatment with such an activatable antibody comprising such a CM. Likewise, patients that test negative might be identified as suitable candidates for another form of therapy. In some embodiments, such patients that test negative with respect to a first activatable antibody can be tested with other activatable antibodies comprising different CMs until a suitable activatable antibody for treatment is identified (e.g., an activatable antibody comprising a CM that is cleaved by the patient at the site of disease). In some embodiments, the patient is then administered a therapeutically effective amount of the activatable antibody for which the patient tested positive.

[0558] In some embodiments of the methods and kits, the method or kit is used to identify or otherwise refine a patient population suitable for treatment with an activatable antibody of the disclosure. For example, patients that test positive for both the target (e.g., the target) and a protease that cleaves the substrate in the cleavable moiety (CM) of the activatable antibody being tested in these methods are identified as suitable candidates for treatment with such an activatable antibody comprising such a CM. Likewise, patients that test negative for both of the targets (e.g., the target) and the protease that cleaves the substrate in the CM in the activatable antibody being tested using these methods might be identified as suitable candidates for another form of therapy. In some embodiments, such patients can be tested with other activatable antibodies until a suitable activatable antibody for treatment is identified (e.g., an activatable antibody comprising a CM that is cleaved by the patient at the site of disease). In some embodiments, patients that test negative for either of the target (e.g., the target) are identified as suitable candidates for treatment with such an activatable antibody comprising such a CM. In some embodiments, patients that test negative for either of the target (e.g., the target) are identified as not being suitable candidates for treatment with such an activatable antibody comprising such a CM. In some embodiments, such patients can be tested with other activatable antibodies until a suitable activatable antibody for treatment is identified (e.g., an activatable antibody comprising a CM that is cleaved by the patient at the site of disease). In some embodiments, the activatable antibody is an activatable antibody to which a therapeutic agent is conjugated. In some embodiments, the activatable antibody is not conjugated to an agent. In some embodiments, the activatable antibody comprises a detectable label. In some embodiments, the detectable label is positioned on the AB. In some embodiments, measuring the level of activatable antibody in the subject or sample is accomplished using a secondary reagent that specifically binds to the activated antibody, wherein the reagent comprises a detectable label. In some embodiments, the secondary reagent is an antibody comprising a detectable label.

[0559] In some embodiments, a method or kit is used to identify or otherwise refine a patient population suitable for treatment with an anti-the target activatable antibody and/or conjugated activatable antibody (e.g., activatable antibody to which a therapeutic agent is conjugated) of the disclosure, followed by treatment by administering that activatable antibody and/or conjugated activatable antibody to a subject in need thereof. For example, patients that test positive for both the targets (e.g., the target) and a protease that cleaves the substrate in the cleavable moiety (CM) of the activatable antibody and/or conjugated activatable antibody being tested in these methods are identified as suitable candidates for treatment with such antibody and/or such a conjugated activatable antibody comprising such a CM, and the patient is then administered a therapeutically effective amount of the activatable antibody and/or conjugated activatable antibody that was tested. Likewise, patients that test negative for either or both of the target (e.g., the target) and the protease that cleaves the substrate in the CM in the activatable antibody being tested using these methods might be identified as suitable candidates for another form of therapy. In some embodiments, such patients can be tested with other antibody and/or conjugated activatable antibody until a suitable antibody and/or conjugated activatable antibody for treatment is identified (e.g., an activatable antibody and/or conjugated activatable antibody comprising a CM that is cleaved by the patient at the site of disease). In some embodiments, the patient is then administered a therapeutically effective amount of the activatable antibody and/or conjugated activatable antibody for which the patient tested positive.

[0560] In some embodiments of these methods and kits, the MM is a peptide having a length from about 4 to 40 amino acids. In some embodiments of these methods and kits, the activatable antibody comprises a linker peptide, wherein the linker peptide is positioned between the MM and the CM. In some embodiments of these methods and kits, the activatable antibody comprises a linker peptide, where the linker peptide is positioned between the AB and the CM. In some embodiments of these methods and kits, the activatable antibody comprises a first linker peptide (L1) and a second linker peptide (L2), wherein the first linker peptide is positioned between the MM and the CM and the second linker peptide is positioned between the AB and the CM. In some embodiments of these methods and kits, each of L1 and L2 is a peptide of about 1 to 20 amino acids in length, and wherein each of L1 and L2 need not be the same linker. In some embodiments of these methods and kits, one or both of L1 and L2 comprises a glycine-serine polymer. In some embodiments of these methods and kits, at least one of L1 and L2 comprises an amino acid sequence selected from the group consisting of (GS)ₙ, (GSGGS)ₙ (SEQ ID NO: 339) and (GGGS)ₙ (SEQ ID NO: 340), where n is an integer of at least one. In some embodiments of these methods and kits, at least one of L1 and L2 comprises an amino acid sequence having the formula (GGS)ₙ, where n is an integer of at least one. In some embodiments of these methods and kits, at least one of L1 and L2 comprises an amino acid sequence selected from the group consisting of Gly-Gly-Ser-Gly (SEQ ID NO: 341, Gly-Gly-Ser-Gly-Gly (SEQ ID NO: 342), Gly-Ser-Gly-Ser-Gly (SEQ ID NO: 343, Gly-Ser-Gly-Gly-Gly (SEQ ID NO: 344), Gly-Gly-Gly-Ser-Gly (SEQ ID NO: 345), and Gly-Ser-Ser-Ser-Gly (SEQ ID NO: 346).

[0561] In some embodiments of these methods and kits, the AB comprises an antibody or antibody fragment sequence selected from the cross-reactive antibody sequences presented herein. In some embodiments of these methods and kits, the AB comprises a Fab fragment, a scFv or a single chain antibody (scAb).

[0562] In some embodiments of these methods and kits, the cleaving agent is a protease that is co-localized in the subject or sample with the target and the CM is a polypeptide that functions as a substrate for the protease, wherein the protease cleaves the CM in the activatable antibody when the activatable antibody is exposed to the protease. In some embodiments of these methods and kits, the CM is a polypeptide of up to 15 amino acids in length. In some embodiments of these methods and kits, the CM is coupled to the N-terminus of the AB. In some embodiments of these methods and kits, the CM is coupled to the C-terminus of the AB. In some embodiments of these methods and kits, the CM is coupled to the N-terminus of a VL chain of the AB.

[0563] The antibodies, conjugated antibodies, activatable antibodies and/or conjugated activatable antibodies of the disclosure are used in diagnostic and prophylactic formulations. In one embodiment, an activatable antibody is administered to patients that are at risk of developing one or more of the aforementioned inflammation, inflammatory disorders, cancer or other disorders.

[0564] A patient's or organ's predisposition to one or more of the aforementioned disorders can be determined using genotypic, serological or biochemical markers.

[0565] In some embodiments of the disclosure, an antibody, a conjugated antibody, an activatable antibody and/or a conjugated activatable antibody is administered to human individuals diagnosed with a clinical indication associated with one or more of the aforementioned disorders. Upon diagnosis, an antibody, a conjugated antibody, an activatable antibody and/or a conjugated activatable antibody is administered to mitigate or reverse the effects of the clinical indication.

[0566] Antibodies, conjugated antibodies, activatable antibodies and/or conjugated activatable antibodies of the disclosure are also useful in the detection of the target in patient samples and accordingly are useful as diagnostics. For example, the antibodies, conjugated antibodies, the activatable antibodies and/or conjugated activatable antibodies of the disclosure are used in in vitro assays, e.g., ELISA, to detect target levels in a patient sample.

[0567] In one embodiment, an antibody and/or activatable antibody of the disclosure is immobilized on a solid support (e.g., the well(s) of a microtiter plate). The immobilized antibody and/or activatable antibody serves as a capture antibody for any target that may be present in a test sample. Prior to contacting the immobilized antibody and/or activatable antibody with a patient sample, the solid support is rinsed and treated with a blocking agent such as milk protein or albumin to prevent nonspecific adsorption of the analyte.

[0568] Subsequently the wells are treated with a test sample suspected of containing the antigen, or with a solution containing a standard amount of the antigen. Such a sample is, e.g., a serum sample from a subject suspected of having levels of circulating antigen considered to be diagnostic of a pathology. After rinsing away the test sample or standard, the solid support is treated with a second antibody that is detectably labeled. The labeled second antibody serves as a detecting antibody. The level of detectable label is measured, and the concentration of target antigen in the test sample is determined by comparison with a standard curve developed from the standard samples.

[0569] It will be appreciated that based on the results obtained using the antibodies and/or activatable antibodies of the disclosure in an in vitro diagnostic assay, it is possible to stage a disease in a subject based on expression levels of the Target antigen. For a given disease, samples of blood are taken from subjects diagnosed as being at various stages in the progression of the disease, and/or at various points in the therapeutic treatment of the disease. Using a population of samples that provides statistically significant results for each stage of progression or therapy, a range of concentrations of the antigen that may be considered characteristic of each stage is designated.

[0570] Antibodies, conjugated antibodies, activatable antibodies and/or conjugated activatable antibodies can also be used in diagnostic and/or imaging methods. In some embodiments, such methods are in vitro methods. In some embodiments, such methods are in vivo methods. In some embodiments, such methods are in situ methods. In some embodiments, such methods are ex vivo methods. For example, activatable antibodies having an enzymatically cleavable CM can be used to detect the presence or absence of an enzyme that is capable of cleaving the CM. Such activatable antibodies can be used in diagnostics, which can include in vivo detection (e.g., qualitative or quantitative) of enzyme activity (or, in some embodiments, an environment of increased reduction potential such as that which can provide for reduction of a disulfide bond) through measured accumulation of activated antibodies (i.e., antibodies resulting from cleavage of an activatable antibody) in a given cell or tissue of a given host organism. Such accumulation of activated antibodies indicates not only that the tissue expresses enzymatic activity (or an increased reduction potential depending on the nature of the CM) but also that the tissue expresses target to which the activated antibody binds.

[0571] For example, the CM can be selected to be a protease substrate for a protease found at the site of a tumor, at the site of a viral or bacterial infection at a biologically confined site (e.g., such as in an abscess, in an organ, and the like), and the like. The AB can be one that binds a target antigen. Using methods familiar to one skilled in the art, a detectable label (e.g., a fluorescent label or radioactive label or radiotracer) can be conjugated to an AB or other region of an activatable antibody. Suitable detectable labels are discussed in the context of the above screening methods and additional specific examples are provided below. Using an AB specific to a protein or peptide of the disease state, along with a protease whose activity is elevated in the disease tissue of interest, activatable antibodies will exhibit an increased rate of binding to disease tissue relative to tissues where the CM specific enzyme is not present at a detectable level or is present at a lower level than in disease tissue or is inactive (e.g., in zymogen form or in complex with an inhibitor). Since small proteins and peptides are rapidly cleared from the blood by the renal filtration system, and because the enzyme specific for the CM is not present at a detectable level (or is present at lower levels in non-disease tissues or is present in inactive conformation), accumulation of activated antibodies in the disease tissue is enhanced relative to non-disease tissues.

[0572] In another example, activatable antibodies can be used to detect the presence or absence of a cleaving agent in a sample. For example, where the activatable antibodies contain a CM susceptible to cleavage by an enzyme, the activatable antibodies can be used to detect (either qualitatively or quantitatively) the presence of an enzyme in the sample. In another example, where the activatable antibodies contain a CM susceptible to cleavage by reducing agent, the activatable antibodies can be used to detect (either qualitatively or quantitatively) the presence of reducing conditions in a sample. To facilitate analysis in these methods, the activatable antibodies can be detectably labeled, and can be bound to a support (e.g., a solid support, such as a slide or bead). The detectable label can be positioned on a portion of the activatable antibody that is not released following cleavage, for example, the detectable label can be a quenched fluorescent label or other label that is not detectable until cleavage has occurred. The assay can be conducted by, for example, contacting the immobilized, detectably labeled activatable antibodies with a sample suspected of containing an enzyme and/or reducing agent for a time sufficient for cleavage to occur, then washing to remove excess sample and contaminants. The presence or absence of the cleaving agent (e.g., enzyme or reducing agent) in the sample is then assessed by a change in detectable signal of the activatable antibodies prior to contacting with the sample e.g., the presence of and/or an increase in detectable signal due to cleavage of the activatable antibody by the cleaving agent in the sample.

[0573] Such detection methods can be adapted to also provide for detection of the presence or absence of a target that is capable of binding the AB of the activatable antibodies when cleaved. Thus, the assays can be adapted to assess the presence or absence of a cleaving agent and the presence or absence of a target of interest. The presence or absence of the cleaving agent can be detected by the presence of and/or an increase in detectable label of the activatable antibodies as described above, and the presence or absence of the target can be detected by detection of a target-AB complex e.g., by use of a detectably labeled anti-target antibody.

[0574] Activatable antibodies are also useful in in situ imaging for the validation of activatable antibody activation, e.g., by protease cleavage, and binding to a particular target. In situ imaging is a technique that enables localization of proteolytic activity and target in biological samples such as cell cultures or tissue sections. Using this technique, it is possible to confirm both binding to a given target and proteolytic activity based on the presence of a detectable label (e.g., a fluorescent label).

[0575] These techniques are useful with any frozen cells or tissue derived from a disease site (e.g. tumor tissue) or healthy tissues. These techniques are also useful with fresh cell or tissue samples.

[0576] In these techniques, an activatable antibody is labeled with a detectable label. The detectable label can be a fluorescent dye, (e.g. Fluorescein Isothiocyanate (FITC), Rhodamine Isothiocyanate (TRITC), a near infrared (NIR) dye (e.g., Qdot® nanocrystals), a colloidal metal, a hapten, a radioactive marker, biotin and an amplification reagent such as streptavidin, or an enzyme (e.g. horseradish peroxidase or alkaline phosphatase).

[0577] Detection of the label in a sample that has been incubated with the labeled, activatable antibody indicates that the sample contains the target and contains a protease that is specific for the CM of the activatable antibody. In some embodiments, the presence of the protease can be confirmed using broad spectrum protease inhibitors such as those described herein, and/or by using an agent that is specific for the protease, for example, an antibody such as A11, which is specific for the protease matriptase and inhibits the proteolytic activity of matriptase; see e.g., International Publication Number WO 2010/129609, published 11 Nov. 2010. The same approach of using broad spectrum protease inhibitors such as those described herein, and/or by using a more selective inhibitory agent can be used to identify a protease or class of proteases specific for the CM of the activatable antibody. In some embodiments, the presence of the target can be confirmed using an agent that is specific for the target, e.g., another antibody, or the detectable label can be competed with unlabeled target. In some embodiments, unlabeled activatable antibody could be used, with detection by a labeled secondary antibody or more complex detection system.

[0578] Similar techniques are also useful for in vivo imaging where detection of the fluorescent signal in a subject, e.g., a mammal, including a human, indicates that the disease site contains the target and contains a protease that is specific for the CM of the activatable antibody.

[0579] These techniques are also useful in kits and/or as reagents for the detection, identification or characterization of protease activity in a variety of cells, tissues, and organisms based on the protease-specific CM in the activatable antibody.

[0580] In some embodiments, in situ imaging and/or in vivo imaging are useful in methods to identify which patients to treat. For example, in in situ imaging, the activatable antibodies are used to screen patient samples to identify those patients having the appropriate protease(s) and target(s) at the appropriate location, e.g., at a tumor site.

[0581] In some embodiments in situ imaging is used to identify or otherwise refine a patient population suitable for treatment with an activatable antibody of the disclosure. For example, patients that test positive for both the target and a protease that cleaves the substrate in the cleavable moiety (CM) of the activatable antibody being tested (e.g., accumulate activated antibodies at the disease site) are identified as suitable candidates for treatment with such an activatable antibody comprising such a CM. Likewise, patients that test negative for either or both of the target and the protease that cleaves the substrate in the CM in the activatable antibody being tested using these methods are identified as suitable candidates for another form of therapy (i.e., not suitable for treatment with the activatable antibody being tested). In some embodiments, such patients that test negative with respect to a first activatable antibody can be tested with other activatable antibodies comprising different CMs until a suitable activatable antibody for treatment is identified (e.g., an activatable antibody comprising a CM that is cleaved by the patient at the site of disease).

[0582] In some embodiments in vivo imaging is used to identify or otherwise refine a patient population suitable for treatment with an activatable antibody of the disclosure. For example, patients that test positive for both the target and a protease that cleaves the substrate in the cleavable moiety (CM) of the activatable antibody being tested (e.g., accumulate activated antibodies at the disease site) are identified as suitable candidates for treatment with such an activatable antibody comprising such a CM. Likewise, patients that test negative are identified as suitable candidates for another form of therapy (i.e., not suitable for treatment with the activatable antibody being tested). In some embodiments, such patients that test negative with respect to a first activatable antibody can be tested with other activatable antibodies comprising different CMs until a suitable activatable antibody for treatment is identified (e.g., an activatable antibody comprising a CM that is cleaved by the patient at the site of disease).

[0583] Pharmaceutical Compositions

[0584] The antibodies, conjugated antibodies, activatable antibodies and/or conjugated activatable antibodies of the disclosure (also referred to herein as “active compounds”), and derivatives, fragments, analogs and homologs thereof, can be incorporated into pharmaceutical compositions suitable for administration. Such compositions typically comprise the antibody, the conjugated antibody, activatable antibody and/or conjugated activatable antibody and a pharmaceutically acceptable carrier. As used herein, the term “pharmaceutically acceptable carrier” is intended to include any and all solvents, dispersion media, coatings, antibacterial and antifungal agents, isotonic and absorption delaying agents, and the like, compatible with pharmaceutical administration. Suitable carriers are described in the most recent edition of Remington's Pharmaceutical Sciences, a standard reference text in the field, which is incorporated herein by reference. Suitable examples of such carriers or diluents include, but are not limited to, water, saline, ringer's solutions, dextrose solution, and 5% human serum albumin. Liposomes and non-aqueous vehicles such as fixed oils may also be used. The use of such media and agents for pharmaceutically active substances is well known in the art. Except insofar as any conventional media or agent is incompatible with the active compound, use thereof in the compositions is contemplated. Supplementary active compounds can also be incorporated into the compositions.

[0585] Pharmaceutical compositions according to the invention can include an antibody/activatable antibody of the invention and a carrier. These pharmaceutical compositions can be included in kits, such as, for example, diagnostic kits.

[0586] In some embodiments, the pharmaceutical composition comprises an antibody of the disclosure, an activatable antibody of the disclosure, a conjugated antibody or the disclosure, and/or a conjugated activatable antibody of the disclosure, and a carrier. In some embodiments, the pharmaceutical composition comprises an additional agent. In some embodiments, the additional agent is a therapeutic agent.

[0587] A pharmaceutical composition of the disclosure is formulated to be compatible with its intended route of administration. Examples of routes of administration include parenteral, e.g., intravenous, intradermal, subcutaneous, oral (e.g., inhalation), transdermal (i.e., topical), transmucosal, and rectal administration. Solutions or suspensions used for parenteral, intradermal, or subcutaneous application can include the following components: a sterile diluent such as water for injection, saline solution, fixed oils, polyethylene glycols, glycerine, propylene glycol or other synthetic solvents; antibacterial agents such as benzyl alcohol or methyl parabens; antioxidants such as ascorbic acid or sodium bisulfite; chelating agents such as ethylenediaminetetraacetic acid (EDTA); buffers such as acetates, citrates or phosphates, and agents for the adjustment of tonicity such as sodium chloride or dextrose. The pH can be adjusted with acids or bases, such as hydrochloric acid or sodium hydroxide. The parenteral preparation can be enclosed in ampoules, disposable syringes or multiple dose vials made of glass or plastic.

[0588] Pharmaceutical compositions suitable for injectable use include sterile aqueous solutions (where water soluble) or dispersions and sterile powders for the extemporaneous preparation of sterile injectable solutions or dispersion. For intravenous administration, suitable carriers include physiological saline, bacteriostatic water, Cremophor EL™ (BASF, Parsippany, N.J.) or phosphate buffered saline (PBS). In all cases, the composition must be sterile and should be fluid to the extent that easy syringeability exists. It must be stable under the conditions of manufacture and storage and must be preserved against the contaminating action of microorganisms such as bacteria and fungi. The carrier can be a solvent or dispersion medium containing, for example, water, ethanol, polyol (for example, glycerol, propylene glycol, and liquid polyethylene glycol, and the like), and suitable mixtures thereof. The proper fluidity can be maintained, for example, by the use of a coating such as lecithin, by the maintenance of the required particle size in the case of dispersion and by the use of surfactants. Prevention of the action of microorganisms can be achieved by various antibacterial and antifungal agents, for example, parabens, chlorobutanol, phenol, ascorbic acid, thimerosal, and the like. In some embodiments, it will be desirable to include isotonic agents, for example, sugars, polyalcohols such as manitol, sorbitol, sodium chloride in the composition. Prolonged absorption of the injectable compositions can be brought about by including in the composition an agent that delays absorption, for example, aluminum monostearate and gelatin.

[0589] Sterile injectable solutions can be prepared by incorporating the active compound in the required amount in an appropriate solvent with one or a combination of ingredients enumerated above, as required, followed by filtered sterilization. Generally, dispersions are prepared by incorporating the active compound into a sterile vehicle that contains a basic dispersion medium and the required other ingredients from those enumerated above. In the case of sterile powders for the preparation of sterile injectable solutions, methods of preparation are vacuum drying and freeze-drying that yields a powder of the active ingredient plus any additional desired ingredient from a previously sterile-filtered solution thereof.

[0590] Oral compositions generally include an inert diluent or an edible carrier. They can be enclosed in gelatin capsules or compressed into tablets. For the purpose of oral therapeutic administration, the active compound can be incorporated with excipients and used in the form of tablets, troches, or capsules. Oral compositions can also be prepared using a fluid carrier for use as a mouthwash, wherein the compound in the fluid carrier is applied orally and swished and expectorated or swallowed. Pharmaceutically compatible binding agents, and/or adjuvant materials can be included as part of the composition. The tablets, pills, capsules, troches and the like can contain any of the following ingredients, or compounds of a similar nature: a binder such as microcrystalline cellulose, gum tragacanth or gelatin; an excipient such as starch or lactose, a disintegrating agent such as alginic acid, Primogel, or corn starch; a lubricant such as magnesium stearate or Sterotes; a glidant such as colloidal silicon dioxide; a sweetening agent such as sucrose or saccharin; or a flavoring agent such as peppermint, methyl salicylate, or orange flavoring.

[0591] For administration by inhalation, the compounds are delivered in the form of an aerosol spray from pressured container or dispenser that contains a suitable propellant, e.g., a gas such as carbon dioxide, or a nebulizer.

[0592] Systemic administration can also be by transmucosal or transdermal means. For transmucosal or transdermal administration, penetrants appropriate to the barrier to be permeated are used in the formulation. Such penetrants are generally known in the art, and include, for example, for transmucosal administration, detergents, bile salts, and fusidic acid derivatives. Transmucosal administration can be accomplished through the use of nasal sprays or suppositories. For transdermal administration, the active compounds are formulated into ointments, salves, gels, or creams as generally known in the art.

[0593] The compounds can also be prepared in the form of suppositories (e.g., with conventional suppository bases such as cocoa butter and other glycerides) or retention enemas for rectal delivery.

[0594] In one embodiment, the active compounds are prepared with carriers that will protect the compound against rapid elimination from the body, such as a controlled release formulation, including implants and microencapsulated delivery systems. Biodegradable, biocompatible polymers can be used, such as ethylene vinyl acetate, polyanhydrides, polyglycolic acid, collagen, polyorthoesters, and polylactic acid. Methods for preparation of such formulations will be apparent to those skilled in the art. The materials can also be obtained commercially from Alza Corporation and Nova Pharmaceuticals, Inc. Liposomal suspensions (including liposomes targeted to infected cells with monoclonal antibodies to viral antigens) can also be used as pharmaceutically acceptable carriers. These can be prepared according to methods known to those skilled in the art, for example, as described in U.S. Pat. No. 4,522,811.

[0595] It is especially advantageous to formulate oral or parenteral compositions in dosage unit form for ease of administration and uniformity of dosage. Dosage unit form as used herein refers to physically discrete units suited as unitary dosages for the subject to be treated; each unit containing a predetermined quantity of active compound calculated to produce the desired therapeutic effect in association with the required pharmaceutical carrier. The specification for the dosage unit forms of the disclosure are dictated by and directly dependent on the unique characteristics of the active compound and the particular therapeutic effect to be achieved, and the limitations inherent in the art of compounding such an active compound for the treatment of individuals.

[0596] The pharmaceutical compositions can be included in a container, pack, or dispenser together with instructions for administration.

[0597] The invention will be further described in the following examples, which do not limit the scope of the invention described in the claims.

### EXAMPLES

### Example 1. Characterization of Anti-Human CD147 Antibodies

[0598] The studies provided herein were designed to evaluate binding of anti-human CD147 antibodies of the disclosure.

[0599] An anti-human CD147 monoclonal antibody of the present disclosure was obtained using mouse hybridoma technology in accordance with techniques known in the art. Mice were immunized with human CD147 extracellular domain (ECD) and subsequent hybridomas were screened for binding to human CD147 ECD by ELISA and subsequently confirmed to be cytotoxic in a piggyback assay and confirmed to bind cell surfaces by FACS. The mouse CD147 3A11 monoclonal antibody of the present disclosure includes a heavy chain variable region (VH) of SEQ ID NO: 4, and a light chain variable region (VL) of SEQ ID NO: 9, and was used where described herein as a positive control.

[0600] The mouse anti-human CD147 monoclonal antibody 3A11 was humanized to form humanized anti-human CD147 heavy chains hu 3A11 Hc1 (VH of SEQ ID NO: 1), hu 3A11 Hc2 (VH of SEQ ID NO: 2), and hu 3A11 Hc3 (VH of SEQ ID NO: 3), as well as humanized anti-3A11 light chains hu 3A11 Lc1 (VL of SEQ ID NO: 5), hu 3A11 Lc2 (VL of SEQ ID NO: 6), hu 3A11 Lc3 (VL of SEQ ID NO: 7), and hu 3A11 Lc4 (VL of SEQ ID NO: 8).

[0601] As shown in FIG. 1, the binding affinity of humanized anti-human CD147 monoclonal antibodies of the present disclosure to human CD147 polypeptide was assayed using an ELISA. The antibody of the present disclosure that was assayed in this exemplary study was hu 3A11 Lc1/Hc1 (VL of SEQ ID NO: 5 and VH of SEQ ID NO: 1). Mouse anti-human CD147 monoclonal antibody 3A11 (VL of SEQ ID NO: 8 and VH of SEQ ID NO: 4) was assayed as a reference. Using a standard ELISA protocol, human CD147 protein was absorbed to ELISA plates and subsequently incubated with the indicated concentration of antibody of the present disclosure. Bound humanized antibody of the present disclosure was detected with anti-human Fab-peroxidase secondary antibody and the mouse 3A11 monoclonal antibody was detected with anti-mouse Fc-peroxidase secondary antibody, and Ultra TMB detection (Thermo Fisher Scientific). The apparent equilibrium dissociation constants (K_{D}) of this exemplary binding study are shown in Table 12.

TABLE 12
Equilibrium Dissociation Constants of Mouse Anti-human
CD147 Antibodies to Human CD147

| Cell Species | K_{D} (nM) |
|---|---|
| hu 3A11 (hu Lc1/hu Hc1) | 0.7099 |
| Mouse 3A11 | 0.2930 |

[0602] As shown in FIG. 2, the binding affinity of humanized anti-human CD147 monoclonal antibodies of the present disclosure to human CD147 polypeptide were assayed using an ELISA. The antibodies of the present disclosure that were assayed in this exemplary study were hu 3A11 Lc1/hu 3A11 Hc1 (VL of SEQ ID NO: 5 and VH of SEQ ID NO: 1), hu 3A11 Lc2/hu 3A11 Hc2 (VL of SEQ ID NO: 6 and VH of SEQ ID NO: 2), hu 3A11 Lc4/hu 3A11 Hc2 (VL of SEQ ID NO: 8 and VH of SEQ ID NO: 2). Using a standard ELISA protocol, human CD147 protein was absorbed to ELISA plates and subsequently incubated with the indicated concentration of antibody of the present disclosure. Bound humanized antibody of the present disclosure was detected with anti-human Fab-peroxidase secondary antibody, and Ultra TMB detection (Thermo Fisher Scientific). The apparent equilibrium dissociation constants (K_{D}) of this exemplary binding study are shown in Table 13.

TABLE 13
Equilibrium Dissociation Constants of Humanized Anti-human
CD147 Antibodies to Human CD147

| Cell Species | K_{D} (nM) |
|---|---|
| hu 3A11 (hu Lc1/hu Hc1) | 0.8518 |
| hu 3A11 (hu Lc2/hu Hc2) | 0.7261 |
| hu 3A11 (hu Lc4/hu Hc2) | 0.9017 |

### Example 2. Anti-Human CD147 Mediated Cell Line Cytotoxicity

[0603] This Example shows that exemplary human cell lines demonstrated sensitivity to anti-human CD147-targeted cytotoxicity.

[0604] FIGS. 3A-3H show the ability of a humanized anti-human CD147 hu 3A11 Lc1/Hc1 antibody of the present disclosure to induce cytotoxicity in certain cell lines. The cell lines tested in this exemplary assay were derived from various carcinomas (Detroit 562, KYSE150, A253, SCC25, SCC9, BHY, KYSE70, and SCC1). In this exemplary assay, the indicated cell lines were cultured using standard cell culture techniques and plated at densities between 500-1000 cells per well. Humanized anti-human CD147 3A11 Lc1/Hc1 monoclonal antibody of the present disclosure (VH of SEQ ID NO: 1; VL of SEQ ID NO: 5) and anti-human mouse IgG1-MMAE control were applied to the cell lines at the indicated concentrations and vc-MMAE conjugated secondary antibody (mouse anti-human secondary antibody conjugated to vc-MMAE) was added at equal concentration to the anti-human CD147 antibody. Plates were visually monitored for cell death and evaluated for cytotoxicity after 3 to 7 days using Celltiter Glo (Promega). The secondary antibody conjugated to vc-MMAE alone was used a control. As shown in FIGS. 3A-3H, exemplary graphs showing cell viability treated by the anti-human CD147 antibody and vc-MMAE conjugated secondary antibody relative to untreated cells are depicted. The EC50 for multiple exemplary cell lines treated by anti-human CD147 antibodies of the present disclosure are shown in Table 14.

TABLE 14
Anti-human CD147 Mediated Cytotoxicity

| Cell line | Origin | EC50 (nM) |
|---|---|---|
| RT11-2/84 | Bladder cancer | 1.94 |
| HCC 1806 | Triple-negative breast cancer | 0.68 |
| HCC 70 | Triple-negative breast cancer | 0.94 |
| HCC1143 | Triple-negative breast cancer | <1.0 |
| HCC1937 | Triple-negative breast cancer | <1.0 |
| HCC1954 | Triple-negative breast cancer | <1.0 |
| HCT 116 | Colorectal cancer | 1.8 |
| LOVO | Colorectal cancer | <1.0 |
| LS174T | Colorectal cancer | ~1 |
| LS411N | Colorectal cancer | <1.0 |
| SW1417 | Colorectal cancer | 0.8 |
| sw48 | Colorectal cancer | <1.0 |
| sw480 | Colorectal cancer | <1.0 |
| BHY | Head-neck squamous cell | <1.0 |
| | carcinoma | |
| Detroit562 | Head-neck squamous cell | 0.008 |
| | carcinoma | |
| KYSE150 | Head-neck squamous cell | 1.6 |
| | carcinoma | |
| KYSE70 | Head-neck squamous cell | 0.13 |
| | carcinoma | |
| SCC1 | Head-neck squamous cell | 0.14 |
| | carcinoma | |
| SCC25 | Head-neck squamous cell | 0.2 |
| | carcinoma | |
| SCC9 | Head-neck squamous cell | 0.37 |
| | carcinoma | |
| H1975 | Lung cancer | 0.09 |
| H292 | Lung cancer | 0.07 |
| H358 | Lung cancer | 0.09 |
| H520 | Lung cancer | 11.19 |
| H1581 | Non-small cell lung cancer | 0.039 |
| H2444 | Non-small cell lung cancer | 1.8 |
| H2405 | Small cell lung cancer | 0.3 |
| H69 | Small cell lung cancer | ~1.0 |
| EFO-21 | Ovarian cancer | 1.4 |
| SKOV3 | Ovarian cancer | 0.95 |
| aspc1 | Pancreatic cancer | 20.5 |
| HPAC | Pancreatic cancer | 0.21 |
| HPAF2 | Pancreatic cancer | <1.0 |
| miapaca1 | Pancreatic cancer | 0.65 |
| PC3 | Prostate cancer | <1.0 |
| A253 | Salivary gland cancer | <1.0 |

### Example 3. Mask Discovery

[0605] The studies provided herein were designed to identify and characterize masking moieties for use in activatable anti-human CD147 antibodies of the disclosure.

[0606] Humanized anti-human CD147 3A11 mouse monoclonal antibody huHc1/huLc1 (VH of SEQ ID NO: 1 and VL of SEQ ID NO: 5) of the present disclosure, was used to screen a random X₁₅ peptide library with a total diversity of 4×10¹⁰, where X is any amino acid, using a method similar to that described in PCT International Publication Number WO 2010/081173, published 15 Jul. 2010. The screening included one round of magnetic-activated cell sorting (MACS) and three rounds of fluorescence-activated cell sorting (FACS). The MACS and FACS sorting scheme is depicted schematically on FIG. 4 The MACS sorting was done with protein-A Dynabeads (Invitrogen) and the anti-human CD147 3A11 antibody were used at a concentration of 200 nM. For the MACS round, approximately 1×10¹² cells were screened for binding and 1×10⁷ cells were collected.

[0607] Anti-human CD147 3A11 of the present disclosure was conjugated with AlexaFluor-488 (Invitrogen) using standard protocols. CD147 binding activity was confirmed and anti-human CD147 3A11 conjugated with AlexaFluor-488 (Ab-488) was used as a fluorescent probe for all FACS rounds. Bacterial cells collected from the FACS round were subsequently stained and positive clones were labeled and sorted as follows (and as described in further detail in U.S. Patent Application Publication No. US 2009/0062142): 10 nM 3A11-488 in FACS round 1 collecting the brightest 2% of cells (M1F1), 1 nM 3A11-488 in FACS round 2.1 collecting the top brightest 0.2% of cell (M1F2.1) or brightest 12% of cells (M1F2.2), 100 μM 3A11-488 in FACS round 3.1 with an 8 minute off-rate screening in PBS at room temperature collecting the top 0.1% of cells. Individual clones from the M1F2.1, M1F2.2, and M1F3.1 populations were sequenced and shown in Table 15.

TABLE 15
Anti-human CD147 masking moieties (MM)

| | |
|---|---|
| Clone# | Sequence |

MACS Round M1F2.1

| | | |
|---|---|---|
| JS10215 | RYQSCHSYWCTEGNH | (SEQ ID NO: 30) |
| JS10217 | QSLFCSGFRCDQYAS | (SEQ ID NO: 31) |
| JS10219 | KHGPCHFRLCPQNTS | (SEQ ID NO: 32) |
| JS10221 | DHGPCHYVSCTTINH | (SEQ ID NO: 33) |
| JS10228 | KHGPCHFRLCPQNTS | (SEQ ID NO: 34) |
| JS10247 | MHSYCHYRMCDGHGT | (SEQ ID NO: 35) |
| JS10218 | WQRECSQKNICQYYI | (SEQ ID NO: 36) |
| JS10222 | THGPCHFKPNCSYPT | (SEQ ID NO: 37) |
| JS10229 | NMRWCTPEINCTHHT | (SEQ ID NO: 38) |
| JS10233 | LHGPCHYDLKCKNNT | (SEQ ID NO: 39) |
| JS10235 | LHGPCHFLQFCDKTL | (SEQ ID NO: 40) |
| JS10239 | AHGPCHYNTECNSNK | (SEQ ID NO: 41) |
| JS10241 | WGTFCSAKNICHLYN | (SEQ ID NO: 42) |
| JS10252 | VHSACHYNLNCINNN | (SEQ ID NO: 43) |
| JS10253 | VHGPCHWSVECLSNV | (SEQ ID NO: 44) |
| JS10224 | SMLCVPDTWMCRLAN | (SEQ ID NO: 45) |
| JS10216 | HGPCHYNFNSGCAQF | (SEQ ID NO: 46) |
| JS10243 | LYGCGEFVAERCPRH | (SEQ ID NO: 47) |
| JS10220 | VLCGGMGLKFGTCRM | (SEQ ID NO: 48) |
| JS10251 | PCGDHYYFIKYGCNE | (SEQ ID NO: 49) |
| JS10214 | TDCVCRLWHCCVGVL | (SEQ ID NO: 50) |
| JS10225 | AYPCPCRQQHCCHDQ | (SEQ ID NO: 51) |
| JS10245 | SHTACRYNTCCPHHS | (SEQ ID NO: 52) |

MACS Round M1F2.2

| | | |
|---|---|---|
| JS10276 | THGPCHYKECDWMTI | (SEQ ID NO: 53) |
| JS10283 | DNNVCWKHYCQSQYY | (SEQ ID NO: 54) |
| JS10285 | RYQSCHSYWCTEGNH | (SEQ ID NO: 55) |
| JS10254 | LPQNCHSYYACNFNT | (SEQ ID NO: 56) |
| JS10256 | WQRECSQKNICQYYI | (SEQ ID NO: 57) |
| JS10260 | LDRRCTVEFGCLSSS | (SEQ ID NO: 58) |
| JS10273 | TLQTCHSYFQCTQSQ | (SEQ ID NO: 59) |
| JS10275 | LHGPCHFLQFCDKTL | (SEQ ID NO: 60) |
| JS10261 | PQTCHSYLVTNCNLN | (SEQ ID NO: 61) |
| JS10267 | LQMCHSYFQHSCENR | (SEQ ID NO: 62) |
| JS10274 | VQSCHSYYVAWCHRG | (SEQ ID NO: 63) |
| JS10282 | QQTCHSYYTNYCSQT | (SEQ ID NO: 64) |
| JS10287 | QADCFNQSWMSCLSY | (SEQ ID NO: 65) |
| JS10259 | VWCSSGIPNRACLHH | (SEQ ID NO: 66) |
| JS10284 | HPCKSTPSARQCKYN | (SEQ ID NO: 67) |
| JS10265 | MQCSHSYFIQHYCNK | (SEQ ID NO: 68) |
| JS10271 | VLCGGMGLKFGTCRM | (SEQ ID NO: 69) |
| JS10280 | VLCGWGELRWGECVT | (SEQ ID NO: 70) |
| JS10255 | ECHLRGPHPQHHCNK | (SEQ ID NO: 71) |
| JS10264 | TCLHLTRFNYLSCNK | (SEQ ID NO: 72) |
| JS10268 | DCELFPQNSYHGCIN | (SEQ ID NO: 73) |
| JS10290 | TCERITMHNYIHCPN | (SEQ ID NO: 74) |

MACS Round M1F3.1

| | | |
|---|---|---|
| JS10414 | THGPCHFKPNCSYPT | (SEQ ID NO: 75) |
| JS10419 | LHGPCHYDLKCKNNT | (SEQ ID NO: 76) |
| JS10445 | SHGPCHFDYQCINNT | (SEQ ID NO: 77) |
| JS10443 | AHGPCHYNTECNSNK | (SEQ ID NO: 78) |
| JS10422 | LHGPCHYMNTCHNVK | (SEQ ID NO: 79) |
| JS10415 | LHGPCHFNNCNTLKL | (SEQ ID NO: 80) |
| JS10431 | IHGPCHYNECIMSKN | (SEQ ID NO: 81) |
| JS10428 | WHGPCHYTKCDDHTM | (SEQ ID NO: 82) |
| JS10444 | THGPCHYKECDWMTI | (SEQ ID NO: 83) |
| JS10417 | DHGPCHYVSCTTINH | (SEQ ID NO: 84) |
| JS10446 | LHGLCHYRNCDLPQR | (SEQ ID NO: 85) |
| JS10427 | KHGPCHFRLCPQNTS | (SEQ ID NO: 86) |
| JS10416 | WQRECSQKNICQYYI | (SEQ ID NO: 87) |
| JS10440 | TCLHLTRFNYLSCNK | (SEQ ID NO: 88) |
| JS10423 | FSCGFRGGYMRLCGG | (SEQ ID NO: 89) |

[0608] As shown in FIG. 5, the binding affinity of the humanized anti-human CD147 3A11 monoclonal antibody of the present disclosure was tested against individual bacterial clones displaying certain anti-human CD147 masking moiety clones. In this exemplary assay, each bacterial clone was bound with 10 nM, 1 nM, or 0.1 nM of AlexaFluor-488 labeled humanized 3A11 antibody of the present disclosure (VH of SEQ ID NO: 1 and VL of SEQ ID NO: 5). The cells were labeled with yPet (100 nM) to measure surface expression of each clone. The masking moieties that were tested are indicated with the clone number as shown above.

[0609] These masking peptides were used to generate anti-human CD147 activatable antibodies of the disclosure. The sequences for certain of these anti-human CD147 activatable antibodies are shown below in Table 17. In some embodiments, these anti-human CD147 activatable antibodies include cleavable moiety 2001 (ISSGLLSGRSDNH; SEQ ID NO: 406), cleavable moiety 3001 (AVGLLAPPGGLSGRSDNH; SEQ ID NO: 412), cleavable moiety 2007 (ISSGLLSGRSDIH; SEQ ID NO: 684), cleavable moiety 2008 (ISSGLLSGRSDQH; SEQ ID NO: 685), cleavable moiety 2011 (ISSGLLSGRSDNP; SEQ ID NO: 688), cleavable moiety 2012 (ISSGLLSGRSANP; SEQ ID NO: 689), cleavable moiety 2013 (ISSGLLSGRSANI; SEQ ID NO: 690), cleavable moiety 3007 (AVGLLAPPGGLSGRSDIH; SEQ ID NO: 692), cleavable moiety 3008 (AVGLLAPPGGLSGRSDQH; SEQ ID NO: 693), cleavable moiety 3011 (AVGLLAPPGGLSGRSDNP; SEQ ID NO: 696), cleavable moiety 3012 (AVGLLAPPGGLSGRSANP; SEQ ID NO: 697), or cleavable moiety 3013 (AVGLLAPPGGLSGRSANI; SEQ ID NO: 698), as indicated.

[0610] While certain sequences shown below include the spacer sequence of SEQ ID NO: 645, those of ordinary skill in the art appreciate that the activatable anti-human CD147 antibodies of the disclosure can include any suitable spacer sequence, such as, for example, a spacer sequence selected from the group consisting of QGQSGQG (SEQ ID NO: 645), QGQSGQ (SEQ ID NO: 424), QGQSG (SEQ ID NO: 646), QGQS (SEQ ID NO: 647), QGQ (SEQ ID NO: 648), QG (SEQ ID NO: 649), GQSGQG (SEQ ID NO: 666), QSGQG (SEQ ID NO: 667), SGQG (SEQ ID NO: 668), GQG (SEQ ID NO: 669), G, or Q. In some embodiments, the activatable anti-human CD147 antibodies of the disclosure can have no spacer sequence joined to its N-terminus.

TABLE 16
Anti-human CD147 Antibody Sequences

1. huCD147 3A11 Hc1 Heavy Chain:
Amino Acid sequence
EVQLVESGGGLVQPGGSLRLSCAASGFTFSNYWMNWVRQAPGKGLEWVGEIRLKSYNYATHYAASVKGRF
TISRDDSKNSVYLQMNSLKTEDTAVYYCTAAGTDYWGQGTLVTVSSASTKGPSVFPLAPSSKSTSGGTAA
LGCLVKDYFPEPVTVSWNSGALTSGVHTFPAVLQSSGLYSLSSVVTVPSSSLGTQTYICNVNHKPSNTKV
DKKVEPKSCDKTHTCPPCPAPELLGGPSVFLFPPKPKDTLMISRTPEVTCVVVDVSHEDPEVKFNWYVDG
VEVHNAKTKPREEQYNSTYRVVSVLTVLHQDWLNGKEYKCKVSNKALPAPIEKTISKAKGQPREPQVYTL
PPSREEMTKNQVSLTCLVKGFYPSDIAVEWESNGQPENNYKTTPPVLDSDGSFFLYSKLTVDKSRWQQGN
VFSCSVMHEALHNHYTQKSLSLSPGK (SEQ ID NO: 19)
2. huCD147 3A11 Hc2 Heavy Chain:
Amino Acid sequence
EVQLVESGGGLVQPGGSLRLSCAASGFTFSNYWMNWVRQAPGKGLEWVGEIRLKSYNYATHYAASVKGRF
TISRDDSKNSLYLQMNSLKTEDTAVYYCARAGTDYWGQGTLVTVSSASTKGPSVFPLAPSSKSTSGGTAA
LGCLVKDYFPEPVTVSWNSGALTSGVHTFPAVLQSSGLYSLSSVVTVPSSSLGTQTYICNVNHKPSNTKV
DKKVEPKSCDKTHTCPPCPAPELLGGPSVFLFPPKPKDTLMISRTPEVTCVVVDVSHEDPEVKFNWYVDG
VEVHNAKTKPREEQYNSTYRVVSVLTVLHQDWLNGKEYKCKVSNKALPAPIEKTISKAKGQPREPQVYTL
PPSREEMTKNQVSLTCLVKGFYPSDIAVEWESNGQPENNYKTTPPVLDSDGSFFLYSKLTVDKSRWQQGN
VFSCSVMHEALHNHYTQKSLSLSPGK (SEQ ID NO: 20)
3. huCD147 3A11 Hc3 Light Chain:
Amino Acid sequence
EVQLVESGGGLVQPGGSLRLSCAASGFTFSNYWMNWVRQAPGKGLEWVGEIRLKSYNYATHYVASVKGRF
TISRDDSKNSVYLQMNSLKTEDTAVYYCTAAGTDYWGQGTLLTVSSASTKGPSVFPLAPSSKSTSGGTAA
LGCLVKDYFPEPVTVSWNSGALTSGVHTFPAVLQSSGLYSLSSVVTVPSSSLGTQTYICNVNHKPSNTKV
DKKVEPKSCDKTHTCPPCPAPELLGGPSVFLFPPKPKDTLMISRTPEVTCVVVDVSHEDPEVKFNWYVDG
VEVHNAKTKPREEQYNSTYRVVSVLTVLHQDWLNGKEYKCKVSNKALPAPIEKTISKAKGQPREPQVYTL
PPSREEMTKNQVSLTCLVKGFYPSDIAVEWESNGQPENNYKTTPPVLDSDGSFFLYSKLTVDKSRWQQGN
VFSCSVMHEALHNHYTQKSLSLSPGK (SEQ ID NO: 21)
4. huCD147 3A11 Lc1 Light Chain:
Amino Acid sequence
DIQMTQSPSSLSASVGDRVTITCRASQSVRTDVGWYQQKPGKAPKLLIYYSSNRYTGVPSRFSGSGSGTD
FTLTISSLQPEDFATYYCQQDYSSPYTFGQGTKLEIKRTVAAPSVFIFPPSDEQLKSGTASVVCLLNNFY
PREAKVQWKVDNALQSGNSQESVTEQDSKDSTYSLSSTLTLSKADYEKHKVYACEVTHQGLSSPVTKSFN
RGEC (SEQ ID NO: 23)
5. huCD147 3A11 Lc2 Light Chain:
Amino Acid sequence
DIQMTQSPSSLSASVGDRVTITCKASQSVRTDVAWYQQKPGKAPKLLIYYSSNRYTGVPSRFSGSGSGTD
FTLTISSLQPEDFATYYCQQDYSSPFTFGQGTKLEIKRTVAAPSVFIFPPSDEQLKSGTASVVCLLNNFY
PREAKVQWKVDNALQSGNSQESVTEQDSKDSTYSLSSTLTLSKADYEKHKVYACEVTHQGLSSPVTKSFN
RGEC (SEQ ID NO: 24)
6. huCD147 3A11 Lc3 Light Chain:
Amino Acid sequence
DIQMTQSPSSLSVSVGDRVTITCKASQSVRTDVAWYQQKPGKAPKLLIYYSSNRYTGVPSRFSGSGSGTD
FTFTISSVQPEDFATYYCQQDYSSPFTFGQGTKLEIKRTVAAPSVFIFPPSDEQLKSGTASVVCLLNNFY
PREAKVQWKVDNALQSGNSQESVTEQDSKDSTYSLSSTLTLSKADYEKHKVYACEVTHQGLSSPVTKSFN
RGEC (SEQ ID NO: 25)
7. huCD147 3A11 Lc4 Light Chain:
Amino Acid sequence
DIQMTQSPSSLSVSVGDRVTITCKASQSVRTDVAWYQQKPGKAPKLLIYYSSNRYTGVPSRFSGSGYGTD
FTFTISSVQPEDFATYYCQQDYSSPFTFGQGTKLEIKRTVAAPSVFIFPPSDEQLKSGTASVVCLLNNFY
PREAKVQWKVDNALQSGNSQESVTEQDSKDSTYSLSSTLTLSKADYEKHKVYACEVTHQGLSSPVTKSFN
RGEC (SEQ ID NO: 26)
10. huCD147 3A11 Hc1 VH domain:
Amino Acid sequence
EVQLVESGGGLVQPGGSLRLSCAASGFTFSNYWMDWVRQAPGKGLEWVGEIRLKSYNYATHYAASVKGRF
TISRDDSKNSVYLQMNSLKTEDTAVYYCTAAGTDYWGQGTLVTVSS (SEQ ID NO: 1)
11. huCD147 3A11 Hc2 VH domain:
Amino Acid sequence
EVQLVESGGGLVQPGGSLRLSCAASGFTFSNYWMNWVRQAPGKGLEWVGEIRLKSYNYATHYAASVKGRF
TISRDDSKNSLYLQMNSLKTEDTAVYYCARAGTDYWGQGTLVTVSS (SEQ ID NO: 2)
12. huCD147 3A11 Hc3 VH domain:
Amino Acid sequence
EVQLVESGGGLVQPGGSLRLSCAASGFTFSNYWMNWVRQAPGKGLEWVGEIRLKSYNYATHYVASVKGRF
TISRDDSKNSVYLQMNSLKTEDTAVYYCTAAGTDYWGQGTLLTVSS (SEQ ID NO: 3)
13. huCD147 3A11 Lc1 VL domain:
Amino Acid sequence
DIQMTQSPSSLSASVGDRVTITCRASQSVRTDVGWYQQKPGKAPKLLIYYSSNRYTGVPSRFSGSGSGTD
FTLTISSLQPEDFATYYCQQDYSSPYTFGQGTKLEIK (SEQ ID NO: 5)
14. huCD147 3A11 Lc2 VL domain:
Amino Acid sequence
DIQMTQSPSSLSASVGDRVTITCKASQSVRTDVAWYQQKPGKAPKLLIYYSSNRYTGVPSRFSGSGSGTD
FTLTISSLQPEDFATYYCQQDYSSPFTFGQGTKLEIK (SEQ ID NO: 6)
15. huCD147 3A11 Lc3 VL domain:
Amino Acid sequence
DIQMTQSPSSLSVSVGDRVTITCKASQSVRTDVAWYQQKPGKAPKLLIYYSSNRYTGVPSRFSGSGSGTD
FTFTISSVQPEDFATYYCQQDYSSPFTFGQGTKLEIK (SEQ ID NO: 7)
16. huCD147 3A11 Lc4 VL domain:
Amino Acid sequence
DIQMTQSPSSLSVSVGDRVTITCKASQSVRTDVAWYQQKPGKAPKLLIYYSSNRYTGVPSRFSGSGYGTD
FTFTISSVQPEDFATYYCQODYSSPFTFGQGTKLEIK (SEQ ID NO: 8)
17. mouse 3A11 VH domain:
Amino Acid sequence
EVKLEESGGGLVQPGGSMKLSCVASGFTFSNYWMNWVRQSPEKGLEWVGEIRLKSYNYATHYVESVEGRF
TISRDDSKSSVYLQMNNLRAEDTGIYYCTAAGTDYWGQGTTLTVSS (SEQ ID NO: 4)
18. mouse 3A11 VL domain:
Amino Acid sequence
SIVMTQIPKILLVSAGDRVTITCKASQSVRTDVAWYQQKPGQSPKLLIYYSSNRYTGVPDRFTGSGYGTD
FTFTISTVQAEDLAVYFCQQDYSSPFTFGSGTKLEIK (SEQ ID NO: 9)

TABLE 17
Anti-human CD147 Activatable Antibody Sequences

19. [Spacer (SEQ ID NO: 645)][huCD147 3A11 Lc1-215-3001 VL domain (SEQ
ID NO: 140)]
Amino acid sequence
[QGQSGQG][RYQSCHSYWCTEGNHGGGSSGGSAVGLLAPPGGLSGRSDNHGGSDIQMTQSPSS
LSASVGDRVTITCRASQSVRTDVGWYQQKPGKAPKLLIYYSSNRYTGVPSRFSGSGSGTDFTLT
ISSLQPEDFATYYCQQDYSSPYTFGQGTKLEIK] (SEQ ID NO: 185)
21. [Spacer (SEQ ID NO: 645)][huCD147 3A11 Lc1-216-3001 VL domain (SEQ
ID NO: 141)]
Amino acid sequence
[QGQSGQG][HGPCHYNFNSGCAQFGGGSSGGSAVGLLAPPGGLSGRSDNHGGSDIQMTQSPSS
LSASVGDRVTITCRASQSVRTDVGWYQQKPGKAPKLLIYYSSNRYTGVPSRFSGSGSGTDFTLT
ISSLQPEDFATYYCQQDYSSPYTFGQGTKLEIK] (SEQ ID NO: 186)
22. [Spacer (SEQ ID NO: 645)][huCD147 3A11 Lc1-217-3001 VL domain (SEQ
ID NO: 142)]
Amino acid sequence
[QGQSGQG][QSLFCSGFRCDQYASGGGSSGGSAVGLLAPPGGLSGRSDNHGGSDIQMTQSPSS
LSASVGDRVTITCRASQSVRTDVGWYQQKPGKAPKLLIYYSSNRYTGVPSRFSGSGSGTDFTLT
ISSLQPEDFATYYCQQDYSSPYTFGQGTKLEIK] (SEQ ID NO: 187)
23. [Spacer (SEQ ID NO: 645)][huCD147 3A11 Lc1-221-3001 VL domain (SEQ
ID NO: 143)]
Amino acid sequence
[QGQSGQG][DHGPCHYVSCTTINHGGGSSGGSAVGLLAPPGGLSGRSDNHGGSDIQMTQSPSS
LSASVGDRVTITCRASQSVRTDVGWYQQKPGKAPKLLIYYSSNRYTGVPSRFSGSGSGTDFTLT
ISSLQPEDFATYYCQQDYSSPYTFGQGTKLEIK] (SEQ ID NO: 188)
24. [Spacer (SEQ ID NO: 645)][huCD147 3A11 Lc1-253-3001 VL domain (SEQ
ID NO: 144)]
Amino acid sequence
[QGQSGQG][VHGPCHWSVECLSNVGGGSSGGSAVGLLAPPGGLSGRSDNHGGSDIQMTQSPSS
LSASVGDRVTITCRASQSVRTDVGWYQQKPGKAPKLLIYYSSNRYTGVPSRFSGSGSGTDFTLT
ISSLQPEDFATYYCQQDYSSPYTFGQGTKLEIK] (SEQ ID NO: 189)
25. [Spacer (SEQ ID NO: 645)][huCD147 3A11 Lc1-414-3001 VL domain (SEQ
ID NO: 145)]
Amino acid sequence
[QGQSGQG][THGPCHFKPNCSYPTGGGSSGGSAVGLLAPPGGLSGRSDNHGGSDIQMTQSPSS
LSASVGDRVTITCRASQSVRTDVGWYQQKPGKAPKLLIYYSSNRYTGVPSRFSGSGSGTDFTLT
ISSLQPEDFATYYCQQDYSSPYTFGQGTKLEIK] (SEQ ID NO: 190)
26. [Spacer (SEQ ID NO: 645)][huCD147 3A11 Lc1-415-3001 VL domain (SEQ
ID NO: 146)]
Amino acid sequence
[QGQSGQG][LHGPCHFNNCNTLKLGGGSSGGSAVGLLAPPGGLSGRSDNHGGSDIQMTQSPSS
LSASVGDRVTITCRASQSVRTDVGWYQQKPGKAPKLLIYYSSNRYTGVPSRFSGSGSGTDFTLT
ISSLQPEDFATYYCQQDYSSPYTFGQGTKLEIK] (SEQ ID NO: 191)
27. [Spacer (SEQ ID NO: 645)][huCD147 3A11 Lc1-416-3001 VL domain (SEQ
ID NO: 147)]
Amino acid sequence
[QGQSGQG][WQRECSQKNICOYYIGGGSSGGSAVGLLAPPGGLSGRSDNHGGSDIQMTQSPSS
LSASVGDRVTITCRASQSVRTDVGWYQQKPGKAPKLLIYYSSNRYTGVPSRFSGSGSGTDFTLT
ISSLQPEDFATYYCQQDYSSPYTFGQGTKLEIK] (SEQ ID NO: 192)
28. [Spacer (SEQ ID NO: 645)][huCD147 3A11 Lc1-419-3001 VL domain (SEQ
ID NO: 148)]
Amino acid sequence
[QGQSGQG][LHGPCHYDLKCKNNTGGGSSGGSAVGLLAPPGGLSGRSDNHGGSDIQMTQSPSS
LSASVGDRVTITCRASQSVRTDVGWYQQKPGKAPKLLIYYSSNRYTGVPSRFSGSGSGTDFTLT
ISSLQPEDFATYYCQQDYSSPYTFGQGTKLEIK] (SEQ ID NO: 193)
29. [Spacer (SEQ ID NO: 645)][huCD147 3A11 Lc1-422-3001 VL domain (SEQ
ID NO: 149)]
Amino acid sequence
[QGQSGQG][LHGPCHYMNTCHNVKGGGSSGGSAVGLLAPPGGLSGRSDNHGGSDIQMTQSPSS
LSASVGDRVTITCRASQSVRTDVGWYQQKPGKAPKLLIYYSSNRYTGVPSRFSGSGSGTDFTLT
ISSLQPEDFATYYCQQDYSSPYTFGQGTKLEIK] (SEQ ID NO: 194)
30. [Spacer (SEQ ID NO: 645)][huCD147 3A11 Lc1-423-3001 VL domain (SEQ
ID NO: 150)]
Amino acid sequence
[QGQSGQG][FSCGFRGGYMRLCGGGGGSSGGSAVGLLAPPGGLSGRSDNHGGSDIQMTQSPSS
LSASVGDRVTITCRASQSVRTDVGWYQQKPGKAPKLLIYYSSNRYTGVPSRFSGSGSGTDFTLT
ISSLQPEDFATYYCQQDYSSPYTFGQGTKLEIK] (SEQ ID NO: 195)
31. [Spacer (SEQ ID NO: 645)][huCD147 3A11 Lc1-427-3001 VL domain (SEQ
ID NO: 151)]
Amino acid sequence
[QGQSGQG][KHGPCHFRLCPQNTSGGGSSGGSAVGLLAPPGGLSGRSDNHGGSDIQMTQSPSS
LSASVGDRVTITCRASQSVRTDVGWYQQKPGKAPKLLIYYSSNRYTGVPSRFSGSGSGTDFTLT
ISSLQPEDFATYYCQQDYSSPYTFGQGTKLEIK] (SEQ ID NO: 196)
32. [Spacer (SEQ ID NO: 645)][huCD147 3A11 Lc1-428-3001 VL domain (SEQ
ID NO: 152)]
Amino acid sequence
[QGQSGQG][WHGPCHYTKCDDHTMGGGSSGGSAVGLLAPPGGLSGRSDNHGGSDIQMTQSPSS
LSASVGDRVTITCRASQSVRTDVGWYQQKPGKAPKLLIYYSSNRYTGVPSRFSGSGSGTDFTLT
ISSLQPEDFATYYCQQDYSSPYTFGQGTKLEIK] (SEQ ID NO: 197)
33. [Spacer (SEQ ID NO: 645)][huCD147 3A11 Lc1-440-3001 VL domain (SEQ
ID NO: 153)]
Amino acid sequence
[QGQSGQG][TCLHLTRFNYLSCNKGGGSSGGSAVGLLAPPGGLSGRSDNHGGSDIQMTQSPSS
LSASVGDRVTITCRASQSVRTDVGWYQQKPGKAPKLLIYYSSNRYTGVPSRFSGSGSGTDFTLT
ISSLQPEDFATYYCQQDYSSPYTFGQGTKLEIK] (SEQ ID NO: 198)
34. [Spacer (SEQ ID NO: 645)][huCD147 3A11 Lc1-443-3001 VL domain (SEQ
ID NO: 154)]
Amino acid sequence
[QGQSGQG][AHGPCHYNTECNSNKGGGSSGGSAVGLLAPPGGLSGRSDNHGGSDIQMTQSPSS
LSASVGDRVTITCRASQSVRTDVGWYQQKPGKAPKLLIYYSSNRYTGVPSRFSGSGSGTDFTLT
ISSLQPEDFATYYCQQDYSSPYTFGQGTKLEIK] (SEQ ID NO: 199)
35. [Spacer (SEQ ID NO: 645)][huCD147 3A11 Lc1-444-3001 VL domain (SEQ
ID NO: 155)]
Amino acid sequence
[QGQSGQG][THGPCHYKECDWMTIGGGSSGGSAVGLLAPPGGLSGRSDNHGGSDIQMTQSPSS
LSASVGDRVTITCRASQSVRTDVGWYQQKPGKAPKLLIYYSSNRYTGVPSRFSGSGSGTDFTLT
ISSLQPEDFATYYCQQDYSSPYTFGQGTKLEIK] (SEQ ID NO: 200)
36. [Spacer (SEQ ID NO: 645)][huCD147 3A11 Lc1-445-3001 VL domain (SEQ
ID NO: 156)]
Amino acid sequence
[QGQSGQG][SHGPCHFDYQCINNTGGGSSGGSAVGLLAPPGGLSGRSDNHGGSDIQMTQSPSS
LSASVGDRVTITCRASQSVRTDVGWYQQKPGKAPKLLIYYSSNRYTGVPSRFSGSGSGTDFTLT
ISSLQPEDFATYYCQQDYSSPYTFGQGTKLEIK] (SEQ ID NO: 201)

[0611] As shown in FIGS. 6A and 6B, the binding affinity of the anti-human CD147 activatable antibodies of the present disclosure to human CD147 polypeptide were assayed using an ELISA. The activatable antibodies of the present disclosure that were assayed in this exemplary study were (a) hu 3A11 Hc1/Lc1-215-3001 (VL of SEQ ID NO: 140 and VH of SEQ ID NO: 1), (b) hu 3A11 Hc1/Lc1-216-3001 (VL of SEQ ID NO: 141 and VH of SEQ ID NO: 1), (c) hu 3A11 Hc1/Lc1-217-3001 (VL of SEQ ID NO: 142 and VH of SEQ ID NO: 1), (d) hu 3A11 Hc1/Lc1-221-3001 (VL of SEQ ID NO: 143 and VH of SEQ ID NO: 1), (e) hu 3A11 Hc1/Lc1-253-3001 (VL of SEQ ID NO: 144 and VH of SEQ ID NO: 1), (f) hu 3A11 Hc1/Lc1-414-3001 (VL of SEQ ID NO: 145 and VH of SEQ ID NO: 1), (g) hu 3A11 Hc1/Lc1-415-3001 (VL of SEQ ID NO: 146 and VH of SEQ ID NO: 1), (h) hu 3A11 Hc1/Lc1-416-3001 (VL of SEQ ID NO: 147 and VH of SEQ ID NO: 1), (i) hu 3A11 Hc1/Lc1-419-3001 (VL of SEQ ID NO: 148 and VH of SEQ ID NO: 1), (j) hu 3A11 He 1/Lc1-422-3001 (VL of SEQ ID NO: 149 and VH of SEQ ID NO: 1), (k) hu 3A11 Hc1/Lc1-428-3001 (VL of SEQ ID NO: 152 and VH of SEQ ID NO: 1), (l) hu 3A11 Hc1/Lc1-445-3001 (VL of SEQ ID NO: 156 and VH of SEQ ID NO: 1), (m) hu 3A11 He 1/Lc1-443-3001 (VL of SEQ ID NO: 154 and VH of SEQ ID NO: 1), and (n) hu 3A11 Hc1/Lc1-440-3001 (VL of SEQ ID NO: 153 and VH of SEQ ID NO: 1). Humanized anti-human CD147 antibodies of the present disclosure hu 3A11 Hc1/Lc1 (VL of SEQ ID NO: 5 and VH of SEQ ID NO: 1) were used as a control.

[0612] Using a standard ELISA protocol, human CD147 protein was absorbed to ELISA plates and subsequently incubated with the indicated concentration of antibody of the present disclosure. Bound humanized activatable antibody of the present disclosure was detected with anti-human Fab-peroxidase secondary antibody and Ultra TMB detection (Thermo Fisher Scientific). The apparent dissociation constants of this exemplary binding study are shown in Table 18

TABLE 18
Equilibrium Dissociation Constants of Anti-human CD147
Activatable Antibodies To Human CD147

| Ab | K_{D} (nM) |
|---|---|
| hu 3A11 (hu Hc1/Lc1) | 0.14 |
| hu 3A11-215-3001 | 5.53 |
| hu 3A11-216-3001 | 0.89 |
| hu 3A11-217-3001 | 1.61 |
| hu 3A11-221-3001 | 2.50 |
| hu 3A11-253-3001 | 0.87 |
| hu 3A11-414-3001 | 15.97 |
| hu 3A11-415-3001 | 4.72 |
| hu 3A11-416-3001 | 0.49 |
| hu 3A11-419-3001 | 9.43 |
| hu 3A11-422-3001 | 1.55 |
| hu 3A11-428-3001 | 7.63 |
| hu 3A11-445-3001 | 7.86 |
| hu 3A11-443-3001 | 7.40 |
| hu 3A11-440-3001 | 1.23 |

### Example 4. Mask Glycosylation Mutants and Truncation Evaluation

[0613] The studies provided herein were designed to identify and characterize masking moieties with glycosylation mutants and truncated masking moieties for use in activatable anti-human CD147 antibodies of the disclosure.

[0614] As shown in Table 19, variants of the JS10414 and JS10419 masking mutants were constructed that included either amino acid substitutions to remove potential glycosylation sites, or variants that were truncations of the isolated masking moieties.

TABLE 19
Anti-human CD147 truncated masking moieties (MM)

| Clone# | Sequence | |
|---|---|---|
| JS10414 | THGPCHFKPNCSYPT | (SEQ ID NO: 75) |
| JS10414.1 | THGPCHFKPNC | (SEQ ID NO: 90) |
| JS10414.2 | THGPCHFKPQCSYPT | (SEQ ID NO: 91) |
| JS10414.3 | THGPCHFKPNCAYPT | (SEQ ID NO: 92) |
| JS10414.4 | THGPCHFRPNCAYPT | (SEQ ID NO: 93) |
| JS10419 | LHGPCHYDLKCKNNT | (SEQ ID NO: 76) |
| JS10419.1 | LHGPCHYDLKCKQNT | (SEQ ID NO: 94) |
| JS10419.2 | LHGPCHYDLKCKNN | (SEQ ID NO: 95) |
| JS10419.3 | LHGPCHYDLKCK | (SEQ ID NO: 96) |
| JS10419.4 | LHGPCHYDLKC | (SEQ ID NO: 97) |
| JS10415.5 | LHGPCHYDLRC | (SEQ ID NO: 98) |
| JS10415 | LHGPCHFNNCNTLKL | (SEQ ID NO: 80) |
| JS10415.1 | LHGPCHFNNCNTL | (SEQ ID NO: 99) |
| JS10440 | TCLHLTRFNYLSCNK | (SEQ ID NO: 88) |
| JS10440.1 | TCLHLTRFNYLSC | (SEQ ID NO: 100) |

[0615] As shown in Table 20, activatable antibodies of the present invention were constructed to include certain of the masking moiety variants of the present invention.

TABLE 20
Anti-human CD147 Activatable Antibody Sequences

37. [Spacer (SEQ ID NO: 645)][huCD147 3A11 Lc1-414.1-3001 VL
domain (SEQ ID NO: 157)]
Amino acid sequence
[QGQSGQG][THGPCHFKPNCGGGSSGGSAVGLLAPPGGLSGRSDNHGGSDIQMTQSPSSLSAS
VGDRVTITCRASQSVRTDVGWYQQKPGKAPKLLIYYSSNRYTGVPSRFSGSGSGTDFTLTISSL
QPEDFATYYCQQDYSSPYTFGQGTKLEIK] (SEQ ID NO: 202)
38. [Spacer (SEQ ID NO: 645)][huCD147 3A11 Lc1-414.2-3001 VL
domain (SEQ ID NO: 158)]
Amino acid sequence
[QGQSGQG][THGPCHFKPQCSYPTGGGSSGGSAVGLLAPPGGLSGRSDNHGGSDIQMTQSPSS
LSASVGDRVTITCRASQSVRTDVGWYQQKPGKAPKLLIYYSSNRYTGVPSRFSGSGSGTDFTLT
ISSLQPEDFATYYCQQDYSSPYTFGQGTKLEIK] (SEQ ID NO: 203)
39. [Spacer (SEQ ID NO: 645)][huCD147 3A11 Lc1-414.3-3001 VL
domain (SEQ ID NO: 159)]
Amino acid sequence
[QGQSGQG][THGPCHFKPNCAYPTGGGSSGGSAVGLLAPPGGLSGRSDNHGGSDIQMTQSPSS
LSASVGDRVTITCRASQSVRTDVGWYQQKPGKAPKLLIYYSSNRYTGVPSRFSGSGSGTDFTLT
ISSLQPEDFATYYCQQDYSSPYTFGQGTKLEIK] (SEQ ID NO: 204)
40. [Spacer (SEQ ID NO: 645)][huCD147 3A11 Lc1-419.1-3001 VL
domain (SEQ ID NO: 160)]
Amino acid sequence
[QGQSGQG][LHGPCHYDLKCKQNTGGGSSGGSAVGLLAPPGGLSGRSDNHGGSDIQMTQSPSS
LSASVGDRVTITCRASQSVRTDVGWYQQKPGKAPKLLIYYSSNRYTGVPSRFSGSGSGTDFTLT
ISSLQPEDFATYYCQQDYSSPYTFGQGTKLEIK] (SEQ ID NO: 205)
41. [Spacer (SEQ ID NO: 645)][huCD147 3A11 Lc1-419.2-3001 VL
domain (SEQ ID NO: 161)]
Amino acid sequence
[QGQSGQG][LHGPCHYDLKCKNNGGGSSGGSAVGLLAPPGGLSGRSDNHGGSDIQMTQSPSSL
SASVGDRVTITCRASQSVRTDVGWYQQKPGKAPKLLIYYSSNRYTGVPSRFSGSGSGTDFTLTI
SSLQPEDFATYYCQQDYSSPYTFGQGTKLEIK] (SEQ ID NO: 206)
42. [Spacer (SEQ ID NO: 645)][huCD147 3A11 Lc1-419.3-3001 VL
domain (SEQ ID NO: 162)]
Amino acid sequence
[QGQSGQG][LHGPCHYDLKCKGGGSSGGSAVGLLAPPGGLSGRSDNHGGSDIQMTQSPSSLSA
SVGDRVTITCRASQSVRTDVGWYQQKPGKAPKLLIYYSSNRYTGVPSRFSGSGSGTDFTLTISS
LQPEDFATYYCQQDYSSPYTFGQGTKLEIK] (SEQ ID NO: 207)
43. [Spacer (SEQ ID NO: 645)][huCD147 3A11 Lc1-414.3-2012 VL
domain (SEQ ID NO: 163)]
Amino acid sequence
[QGQSGQG][THGPCHFKPNCAYPTGGGSSGGSISSGLLSGRSANPGGGSDIQMTQSPSSLSAS
VGDRVTITCRASQSVRTDVGWYQQKPGKAPKLLIYYSSNRYTGVPSRFSGSGSGTDFTLTISSL
QPEDFATYYCQQDYSSPYTFGQGTKLEIK] (SEQ ID NO: 208)
44. [Spacer (SEQ ID NO: 645)][huCD147 3A11 Lc1-414.4-2012 VL
domain (SEQ ID NO: 164)]
Amino acid sequence
[QGQSGQG][THGPCHFRPNCAYPTGGGSSGGSISSGLLSGRSANPGGGSDIQMTQSPSSLSAS
VGDRVTITCRASQSVRTDVGWYQQKPGKAPKLLIYYSSNRYTGVPSRFSGSGSGTDFTLTISSL
QPEDFATYYCQQDYSSPYTFGQGTKLEIK] (SEQ ID NO: 209)
45. [Spacer (SEQ ID NO: 645)][huCD147 3A11 Lc1-415-2012 VL
domain (SEQ ID NO: 165)]
Amino acid sequence
[QGQSGQG][LHGPCHFNNCNTLKLGGGSSGGSISSGLLSGRSANPGGGSDIQMTQSPSSLSAS
VGDRVTITCRASQSVRTDVGWYQQKPGKAPKLLIYYSSNRYTGVPSRFSGSGSGTDFTLTISSL
QPEDFATYYCQQDYSSPYTFGQGTKLEIK] (SEQ ID NO: 210)
46. [Spacer (SEQ ID NO: 645)][huCD147 3A11 Lc1-415.1-2012 VL
domain (SEQ ID NO: 166)]
Amino acid sequence
[QGQSGQG][LHGPCHFNNCNTLGGGSSGGSISSGLLSGRSANPGGGSDIQMTQSPSSLSASVG
DRVTITCRASQSVRTDVGWYQQKPGKAPKLLIYYSSNRYTGVPSRFSGSGSGTDFTLTISSLQP
EDFATYYCQQDYSSPYTFGQGTKLEIK] (SEQ ID NO: 211)
46. [Spacer (SEQ ID NO: 645)][huCD147 3A11 Lc1-419.3-2012 VL
domain (SEQ ID NO: 167)]
Amino acid sequence
[QGQSGQG][LHGPCHYDLKCKGGGSSGGSISSGLLSGRSANPGGGSDIQMTQSPSSLSASVGD
RVTITCRASQSVRTDVGWYQQKPGKAPKLLIYYSSNRYTGVPSRFSGSGSGTDFTLTISSLQPE
DFATYYCQQDYSSPYTFGQGTKLEIK] (SEQ ID NO: 212)
47. [Spacer (SEQ ID NO: 645)][huCD147 3A11 Lc1-419.4-2012 VL
domain (SEQ ID NO: 168)]
Amino acid sequence
[QGQSGQG][LHGPCHYDLKCGGGSSGGSISSGLLSGRSANPGGGSDIQMTQSPSSLSASVGDR
VTITCRASQSVRTDVGWYQQKPGKAPKLLIYYSSNRYTGVPSRFSGSGSGTDFTLTISSLQPED
FATYYCQQDYSSPYTFGQGTKLEIK] (SEQ ID NO: 213)
48. [Spacer (SEQ ID NO: 645)][huCD147 3A11 Lc1-419.5-2012 VL
domain (SEQ ID NO: 169)]
Amino acid sequence
[QGQSGQG][LHGPCHYDLRCGGGSSGGSISSGLLSGRSANPGGGSDIQMTQSPSSLSASVGDR
VTITCRASQSVRTDVGWYQQKPGKAPKLLIYYSSNRYTGVPSRFSGSGSGTDFTLTISSLQPED
FATYYCQQDYSSPYTFGQGTKLEIK] (SEQ ID NO: 214)
49. [Spacer (SEQ ID NO: 645)][huCD147 3A11 Lc1-440-2012 VL
domain (SEQ ID NO: 170)]
Amino acid sequence
[QGQSGQG][TCLHLTRFNYLSCNKGGGSSGGSISSGLLSGRSANPGGGSDIQMTQSPSSLSAS
VGDRVTITCRASQSVRTDVGWYQQKPGKAPKLLIYYSSNRYTGVPSRFSGSGSGTDFTLTISSL
QPEDFATYYCQQDYSSPYTFGQGTKLEIK] (SEQ ID NO: 215)
50. [Spacer (SEQ ID NO: 645)][huCD147 3A11 Lc1-440.1-2012 VL
domain (SEQ ID NO: 171)]
Amino acid sequence
[QGQSGQG][TCLHLTRFNYLSCGGGSSGGSISSGLLSGRSANPGGGSDIQMTQSPSSLSASVG
DRVTITCRASQSVRTDVGWYQQKPGKAPKLLIYYSSNRYTGVPSRFSGSGSGTDFTLTISSLQP
EDFATYYCQQDYSSPYTFGQGTKLEIK] (SEQ ID NO: 216)
51. [Spacer (SEQ ID NO: 645)][huCD147 3A11 Lc1-215-3001 (SEQ ID
NO: 230)]
Amino acid sequence
[QGQSGQG][RYQSCHSYWCTEGNHGGGSSGGSAVGLLAPPGGLSGRSDNHGGSDIQMTQSPSS
LSASVGDRVTITCRASQSVRTDVGWYQQKPGKAPKLLIYYSSNRYTGVPSRFSGSGSGTDFTLT
ISSLQPEDFATYYCQQDYSSPYTFGQGTKLEIKRTVAAPSVFIFPPSDEQLKSGTASVVCLLNN
FYPREAKVQWKVDNALQSGNSQESVTEQDSKDSTYSLSSTLTLSKADYEKHKVYACEVTHQGLS
SPVTKSFNRGEC] (SEQ ID NO: 285)
52. [Spacer (SEQ ID NO: 645)][huCD147 3A11 Lc1-216-3001 (SEQ ID
NO: 231)]
Amino acid sequence
[QGQSGQG][HGPCHYNFNSGCAQFGGGSSGGSAVGLLAPPGGLSGRSDNHGGSDIQMTQSPSS
LSASVGDRVTITCRASQSVRTDVGWYQQKPGKAPKLLIYYSSNRYTGVPSRFSGSGSGTDFTLT
ISSLQPEDFATYYCQQDYSSPYTFGQGTKLEIKRTVAAPSVFIFPPSDEQLKSGTASVVCLLNN
FYPREAKVQWKVDNALQSGNSQESVTEQDSKDSTYSLSSTLTLSKADYEKHKVYACEVTHQGLS
SPVTKSFNRGEC] (SEQ ID NO: 286)
53. [Spacer (SEQ ID NO: 645)][huCD147 3A11 Lc1-217-3001 (SEQ ID
NO: 232)]
Amino acid sequence
[QGQSGQG][QSLFCSGFRCDQYASGGGSSGGSAVGLLAPPGGLSGRSDNHGGSDIQMTQSPSS
LSASVGDRVTITCRASQSVRTDVGWYQQKPGKAPKLLIYYSSNRYTGVPSRFSGSGSGTDFTLT
ISSLQPEDFATYYCQQDYSSPYTFGQGTKLEIKRTVAAPSVFIFPPSDEQLKSGTASVVCLLNN
FYPREAKVQWKVDNALQSGNSQESVTEQDSKDSTYSLSSTLTLSKADYEKHKVYACEVTHQGLS
SPVTKSFNRGEC] (SEQ ID NO: 287)
54. [Spacer (SEQ ID NO: 645)][huCD147 3A11 Lc1-221-3001 (SEQ ID
NO: 233)]
Amino acid sequence
[QGQSGQG][DHGPCHYVSCTTINHGGGSSGGSAVGLLAPPGGLSGRSDNHGGSDIQMTQSPSS
LSASVGDRVTITCRASQSVRTDVGWYQQKPGKAPKLLIYYSSNRYTGVPSRFSGSGSGTDFTLT
ISSLQPEDFATYYCQQDYSSPYTFGQGTKLEIKRTVAAPSVFIFPPSDEQLKSGTASVVCLLNN
FYPREAKVQWKVDNALQSGNSQESVTEQDSKDSTYSLSSTLTLSKADYEKHKVYACEVTHQGLS
SPVTKSFNRGEC] (SEQ ID NO: 288)
55. [Spacer (SEQ ID NO: 645)][huCD147 3A11 Lc1-253-3001 (SEQ ID
NO: 234)]
Amino acid sequence
[QGQSGQG][VHGPCHWSVECLSNVGGGSSGGSAVGLLAPPGGLSGRSDNHGGSDIQMTQSPSS
LSASVGDRVTITCRASQSVRTDVGWYQQKPGKAPKLLIYYSSNRYTGVPSRFSGSGSGTDFTLT
ISSLQPEDFATYYCQQDYSSPYTFGQGTKLEIKRTVAAPSVFIFPPSDEQLKSGTASVVCLLNN
FYPREAKVQWKVDNALQSGNSOESVTEQDSKDSTYSLSSTLTLSKADYEKHKVYACEVTHQGLS
SPVTKSFNRGEC] (SEQ ID NO: 289)
56. [Spacer (SEQ ID NO: 645)][huCD147 3A11 Lc1-414-3001 (SEQ ID
NO: 235)]
Amino acid sequence
[QGQSGQG][THGPCHFKPNCSYPTGGGSSGGSAVGLLAPPGGLSGRSDNHGGSDIQMIQSPSS
LSASVGDRVTITCRASQSVRTDVGWYQQKPGKAPKLLIYYSSNRYTGVPSRFSGSGSGTDFTLT
ISSLQPEDFATYYCQQDYSSPYTFGQGTKLEIKRTVAAPSVFIFPPSDEQLKSGTASVVCLLNN
FYPREAKVQWKVDNALQSGNSQESVTEQDSKDSTYSLSSTLTLSKADYEKHKVYACEVTHQGLS
SPVTKSFNRGEC] (SEQ ID NO: 280)
57. [Spacer (SEQ ID NO: 645)][huCD147 3A11 Lc1-415-3001 (SEQ ID
NO: 236)]
Amino acid sequence
[QGQSGQG][LHGPCHFNNCNTLKLGGGSSGGSAVGLLAPPGGLSGRSDNHGGSDIQMTQSPSS
LSASVGDRVTITCRASQSVRTDVGWYQQKPGKAPKLLIYYSSNRYTGVPSRFSGSGSGTDFTLT
ISSLQPEDFATYYCQQDYSSPYTFGQGTKLEIKRTVAAPSVFIFPPSDEQLKSGTASVVCLLNN
FYPREAKVQWKVDNALQSGNSQESVTEQDSKDSTYSLSSTLTLSKADYEKHKVYACEVTHQGLS
SPVTKSFNRGEC] (SEQ ID NO: 281)
58. [Spacer (SEQ ID NO: 645)][huCD147 3A11 Lc1-416-3001 (SEQ ID
NO: 237)]
Amino acid sequence
[QGQSGQG][WQRECSQKNICQYYIGGGSSGGSAVGLLAPPGGLSGRSDNHGGSDIQMTQSPSS
LSASVGDRVTITCRASQSVRTDVGWYQQKPGKAPKLLIYYSSNRYTGVPSRFSGSGSGTDFTLT
ISSLQPEDFATYYCQQDYSSPYTFGQGTKLEIKRTVAAPSVFIFPPSDEQLKSGTASVVCLLNN
FYPREAKVQWKVDNALQSGNSQESVTEQDSKDSTYSLSSTLTLSKADYEKHKVYACEVTHQGLS
SPVTKSFNRGEC] (SEQ ID NO: 282)
59. [Spacer (SEQ ID NO: 645)][huCD147 3A11 Lc1-419-3001 (SEQ ID
NO: 238)]
Amino acid sequence
[QGQSGQG][LHGPCHYDLKCKNNTGGGSSGGSAVGLLAPPGGLSGRSDNHGGSDIQMTQSPSS
LSASVGDRVTITCRASQSVRTDVGWYQQKPGKAPKLLIYYSSNRYTGVPSRFSGSGSGTDFTLT
ISSLQPEDFATYYCQQDYSSPYTFGQGTKLEIKRTVAAPSVFIFPPSDEQLKSGTASVVCLLNN
FYPREAKVQWKVDNALQSGNSQESVTEQDSKDSTYSLSSTLTLSKADYEKHKVYACEVTHQGLS
SPVTKSFNRGEC] (SEQ ID NO: 283)
60. [Spacer (SEQ ID NO: 645)][huCD147 3A11 Lc1-422-3001 (SEQ ID
NO: 239)]
Amino acid sequence
[QGQSGQG][LHGPCHYMNTCHNVKGGGSSGGSAVGLLAPPGGLSGRSDNHGGSDIQMTQSPSS
LSASVGDRVTITCRASQSVRTDVGWYQQKPGKAPKLLIYYSSNRYTGVPSRFSGSGSGTDFTLT
ISSLQPEDFATYYCQQDYSSPYTFGQGTKLEIKRTVAAPSVFIFPPSDEQLKSGTASVVCLLNN
FYPREAKVQWKVDNALQSGNSQESVTEQDSKDSTYSLSSTLTLSKADYEKHKVYACEVTHQGLS
SPVTKSFNRGEC] (SEQ ID NO: 284)
61. [Spacer (SEQ ID NO: 645)][huCD147 3A11 Lc1-423-3001 (SEQ ID
NO: 240)]
Amino acid sequence
[QGQSGQG][FSCGFRGGYMRLCGGGGGSSGGSAVGLLAPPGGLSGRSDNHGGSDIQMTQSPSS
LSASVGDRVTITCRASQSVRTDVGWYQQKPGKAPKLLIYYSSNRYTGVPSRFSGSGSGTDFTLT
ISSLQPEDFATYYCQQDYSSPYTFGQGTKLEIKRTVAAPSVFIFPPSDEQLKSGTASVVCLLNN
FYPREAKVQWKVDNALQSGNSQESVTEQDSKDSTYSLSSTLTLSKADYEKHKVYACEVTHQGLS
SPVTKSFNRGEC] (SEQ ID NO: 285)
62. [Spacer (SEQ ID NO: 645)][huCD147 3A11 Lc1-427-3001 (SEQ ID
NO: 241)]
Amino acid sequence
[QGQSGQG][KHGPCHFRLCPQNTSGGGSSGGSAVGLLAPPGGLSGRSDNHGGSDIQMTQSPSS
LSASVGDRVTITCRASQSVRTDVGWYQQKPGKAPKLLIYYSSNRYTGVPSRFSGSGSGTDFTLT
ISSLQPEDFATYYCQQDYSSPYTFGQGTKLEIKRTVAAPSVFIFPPSDEQLKSGTASVVCLLNN
FYPREAKVQWKVDNALQSGNSQESVTEQDSKDSTYSLSSTLTLSKADYEKHKVYACEVTHQGLS
SPVTKSFNRGEC] (SEQ ID NO: 286)
63. [Spacer (SEQ ID NO: 645)][huCD147 3A11 Lc1-428-3001 (SEQ ID
NO: 242)]
Amino acid sequence
[QGQSGQG][WHGPCHYTKCDDHTMGGGSSGGSAVGLLAPPGGLSGRSDNHGGSDIQMTQSPSS
LSASVGDRVTITCRASQSVRTDVGWYQQKPGKAPKLLIYYSSNRYTGVPSRFSGSGSGTDFTLT
ISSLQPEDFATYYCQQDYSSPYTFGQGTKLEIKRTVAAPSVFIFPPSDEQLKSGTASVVCLLNN
FYPREAKVQWKVDNALQSGNSQESVTEQDSKDSTYSLSSTLTLSKADYEKHKVYACEVTHQGLS
SPVTKSFNRGEC] (SEQ ID NO: 287)
64. [Spacer (SEQ ID NO: 645)][huCD147 3A11 Lc1-440-3001 (SEQ ID
NO: 243)]
Amino acid sequence
[QGQSGQG][TCLHLTRFNYLSCNKGGGSSGGSAVGLLAPPGGLSGRSDNHGGSDIQMTQSPSS
LSASVGDRVTITCRASQSVRTDVGWYQQKPGKAPKLLIYYSSNRYTGVPSRFSGSGSGTDFTLT
ISSLQPEDFATYYCQQDYSSPYTFGQGTKLEIKRTVAAPSVFIFPPSDEQLKSGTASVVCLLNN
FYPREAKVQWKVDNALQSGNSQESVTEQDSKDSTYSLSSTLTLSKADYEKHKVYACEVTHQGLS
SPVTKSFNRGEC] (SEQ ID NO: 288)
65. [Spacer (SEQ ID NO: 645)][huCD147 3A11 Lc1-443-3001 (SEQ ID
NO: 244)]
Amino acid sequence
[QGQSGQG][AHGPCHYNTECNSNKGGGSSGGSAVGLLAPPGGLSGRSDNHGGSDIQMTQSPSS
LSASVGDRVTITCRASQSVRTDVGWYQQKPGKAPKLLIYYSSNRYTGVPSRFSGSGSGTDFTLT
ISSLQPEDFATYYCQQDYSSPYTFGQGTKLEIKRTVAAPSVFIFPPSDEQLKSGTASVVCLLNN
FYPREAKVQWKVDNALQSGNSQESVTEQDSKDSTYSLSSTLTLSKADYEKHKVYACEVTHQGLS
SPVTKSFNRGEC] (SEQ ID NO: 289)
66. [Spacer (SEQ ID NO: 645)][huCD147 3A11 Lc1-444-3001 (SEQ ID
NO: 245)]
Amino acid sequence
[QGQSGQG][THGPCHYKECDWMTIGGGSSGGSAVGLLAPPGGLSGRSDNHGGSDIQMTQSPSS
LSASVGDRVTITCRASQSVRTDVGWYQQKPGKAPKLLIYYSSNRYTGVPSRFSGSGSGTDFTLT
ISSLQPEDFATYYCQQDYSSPYTFGQGTKLEIKRTVAAPSVFIFPPSDEQLKSGTASVVCLLNN
FYPREAKVQWKVDNALQSGNSQESVTEQDSKDSTYSLSSTLTLSKADYEKHKVYACEVTHQGLS
SPVTKSFNRGEC] (SEQ ID NO: 290)
67. [Spacer (SEQ ID NO: 645)][huCD147 3A11 Lc1-445-3001 (SEQ ID
NO: 246)]
Amino acid sequence
[QGQSGQG][SHGPCHFDYQCINNTGGGSSGGSAVGLLAPPGGLSGRSDNHGGSDIQMTQSPSS
LSASVGDRVTITCRASQSVRTDVGWYQQKPGKAPKLLIYYSSNRYTGVPSRFSGSGSGTDFTLT
ISSLQPEDFATYYCQQDYSSPYTFGQGTKLEIKRTVAAPSVFIFPPSDEQLKSGTASVVCLLNN
FYPREAKVQWKVDNALQSGNSQESVTEQDSKDSTYSLSSTLTLSKADYEKHKVYACEVTHQGLS
SPVTKSFNRGEC] (SEQ ID NO: 291)
68. [Spacer (SEQ ID NO: 645)][huCD147 3A11 Lc1-414.1-3001 (SEQ
ID NO: 247)]
Amino acid sequence
[QGQSGQG][THGPCHFKPNCGGGSSGGSAVGLLAPPGGLSGRSDNHGGSDIQMTOSPSSLSAS
VGDRVTITCRASQSVRTDVGWYQQKPGKAPKLLIYYSSNRYTGVPSRFSGSGSGTDFTLTISSL
QPEDFATYYCQQDYSSPYTFGQGTKLEIKRTVAAPSVFIFPPSDEQLKSGTASVVCLLNNFYPR
EAKVQWKVDNALQSGNSQESVTEQDSKDSTYSLSSTLTLSKADYEKHKVYACEVTHQGLSSPVT
KSFNRGEC] (SEQ ID NO: 292)
69. [Spacer (SEQ ID NO: 645)][huCD147 3A11 Lc1-414.2-3001 (SEQ
ID NO: 248)]
Amino acid sequence
[QGQSGQG][THGPCHFKPQCSYPTGGGSSGGSAVGLLAPPGGLSGRSDNHGGSDIQMTQSPSS
LSASVGDRVTITCRASQSVRTDVGWYQQKPGKAPKLLIYYSSNRYTGVPSRFSGSGSGTDFTLT
ISSLQPEDFATYYCQQDYSSPYTFGQGTKLEIKRTVAAPSVFIFPPSDEQLKSGTASVVCLLNN
FYPREAKVQWKVDNALQSGNSQESVTEQDSKDSTYSLSSTLTLSKADYEKHKVYACEVTHQGLS
SPVTKSFNRGEC] (SEQ ID NO: 293)
70. [Spacer (SEQ ID NO: 645)][huCD147 3A11 Lc1-414.3-3001 (SEQ
ID NO: 249)]
Amino acid sequence
[QGQSGQG][THGPCHFKPNCAYPTGGGSSGGSAVGLLAPPGGLSGRSDNHGGSDIQMTQSPSS
LSASVGDRVTITCRASQSVRTDVGWYQQKPGKAPKLLIYYSSNRYTGVPSRFSGSGSGTDFTLT
ISSLQPEDFATYYCQQDYSSPYTFGQGTKLEIKRTVAAPSVFIFPPSDEQLKSGTASVVCLLNN
FYPREAKVQWKVDNALQSGNSQESVTEQDSKDSTYSLSSTLTLSKADYEKHKVYACEVTHQGLS
SPVTKSFNRGEC] (SEQ ID NO: 294)
71. [Spacer (SEQ ID NO: 645)][huCD147 3A11 Lc1-419.1-3001 (SEQ
ID NO: 250)]
Amino acid sequence
[QGQSGQG][LHGPCHYDLKCKQNTGGGSSGGSAVGLLAPPGGLSGRSDNHGGSDIQMTQSPSS
LSASVGDRVTITCRASQSVRTDVGWYQQKPGKAPKLLIYYSSNRYTGVPSRFSGSGSGTDFTLT
ISSLQPEDFATYYCQQDYSSPYTFGQGTKLEIKRTVAAPSVFIFPPSDEQLKSGTASVVCLLNN
FYPREAKVQWKVDNALQSGNSQESVTEQDSKDSTYSLSSTLTLSKADYEKHKVYACEVTHQGLS
SPVTKSFNRGEC] (SEQ ID NO: 295)
72. [Spacer (SEQ ID NO: 645)][huCD147 3A11 Lc1-419.2-3001 (SEQ
ID NO: 251)]
Amino acid sequence
[QGQSGQG][LHGPCHYDLKCKNNGGGSSGGSAVGLLAPPGGLSGRSDNHGGSDIQMTQSPSSL
SASVGDRVTITCRASQSVRTDVGWYQQKPGKAPKLLIYYSSNRYTGVPSRFSGSGSGTDFTLTI
SSLQPEDFATYYCQQDYSSPYTFGQGTKLEIKRTVAAPSVFIFPPSDEQLKSGTASVVCLLNNF
YPREAKVQWKVDNALQSGNSQESVTEQDSKDSTYSLSSTLTLSKADYEKHKVYACEVTHQGLSS
PVTKSFNRGEC] (SEQ ID NO: 296)
73. [Spacer (SEQ ID NO: 645)][huCD147 3A11 Lc1-419.3-3001 (SEQ
ID NO: 252)]
Amino acid sequence
[QGQSGQG][LHGPCHYDLKCKGGGSSGGSAVGLLAPPGGLSGRSDNHGGSDIQMTQSPSSLSA
SVGDRVTITCRASQSVRTDVGWYQQKPGKAPKLLIYYSSNRYTGVPSRFSGSGSGTDFTLTISS
LQPEDFATYYCQQDYSSPYTFGQGTKLEIKRTVAAPSVFIFPPSDEQLKSGTASVVCLLNNFYP
REAKVQWKVDNALQSGNSQESVTEQDSKDSTYSLSSTLTLSKADYEKHKVYACEVTHQGLSSPV
TKSFNRGEC] (SEQ ID NO: 297)
74. [Spacer (SEQ ID NO: 645)][huCD147 3A11 Lc1-414.3-2012 (SEQ
ID NO: 253)]
Amino acid sequence
[QGQSGQG][THGPCHFKPNCAYPTGGGSSGGSISSGLLSGRSANPGGGSDIQMTQSPSSLSAS
VGDRVTITCRASQSVRTDVGWYQQKPGKAPKLLIYYSSNRYTGVPSRFSGSGSGTDFTLTISSL
QPEDFATYYCQQDYSSPYTFGQGTKLEIKRTVAAPSVFIFPPSDEQLKSGTASVVCLLNNFYPR
EAKVQWKVDNALQSGNSQESVTEQDSKDSTYSLSSTLTLSKADYEKHKVYACEVTHQGLSSPVT
KSFNRGEC] (SEQ ID NO: 298)
75. [Spacer (SEQ ID NO: 645)][huCD147 3A11 Lc1-414.4-2012 (SEQ
ID NO: 254)]
Amino acid sequence
[QGQSGQG][THGPCHFRPNCAYPTGGGSSGGSISSGLLSGRSANPGGGSDIQMTQSPSSLSAS
VGDRVTITCRASQSVRTDVGWYQQKPGKAPKLLIYYSSNRYTGVPSRFSGSGSGTDFTLTISSL
QPEDFATYYCQQDYSSPYTFGQGTKLEIKRTVAAPSVFIFPPSDEQLKSGTASVVCLLNNFYPR
EAKVQWKVDNALQSGNSQESVTEQDSKDSTYSLSSTLTLSKADYEKHKVYACEVTHQGLSSPVT
KSFNRGEC] (SEQ ID NO: 299)
76. [Spacer (SEQ ID NO: 645)][huCD147 3A11 Lc1-415-2012 (SEQ ID
NO: 255)]
Amino acid sequence
[QGQSGQG][LHGPCHFNNCNTLKLGGGSSGGSISSGLLSGRSANPGGGSDIQMTQSPSSLSAS
VGDRVTITCRASQSVRTDVGWYQQKPGKAPKLLIYYSSNRYTGVPSRFSGSGSGTDFTLTISSL
QPEDFATYYCQQDYSSPYTFGQGTKLEIKRTVAAPSVFIFPPSDEQLKSGTASVVCLLNNFYPR
EAKVQWKVDNALQSGNSQESVTEQDSKDSTYSLSSTLTLSKADYEKHKVYACEVTHQGLSSPVT
KSFNRGEC] (SEQ ID NO: 300)
77. [Spacer (SEQ ID NO: 645)][huCD147 3A11 Lc1-415.1-2012 (SEQ
ID NO: 256)]
Amino acid sequence
[QGQSGQG][LHGPCHFNNCNTLGGGSSGGSISSGLLSGRSANPGGGSDIQMTQSPSSLSASVG
DRVTITCRASQSVRTDVGWYQQKPGKAPKLLIYYSSNRYTGVPSRFSGSGSGTDFTLTISSLQP
EDFATYYCQQDYSSPYTFGQGTKLEIKRTVAAPSVFIFPPSDEQLKSGTASVVCLLNNFYPREA
KVQWKVDNALQSGNSQESYTEQDSKDSTYSLSSTLTLSKADYEKHKVYACEVTHQGLSSPVTKS
FNRGEC] (SEQ ID NO: 301)
78. [Spacer (SEQ ID NO: 645)][huCD147 3A11 Lc1-419.3-2012 (SEQ
ID NO: 257)]
Amino acid sequence
[QGQSGQG][LHGPCHYDLKCKGGGSSGGSISSGLLSGRSANPGGGSDIQMTQSPSSLSASVGD
RVTITCRASQSVRTDVGWYQQKPGKAPKLLIYYSSNRYTGVPSRFSGSGSGTDFTLTISSLQPE
DFATYYCQQDYSSPYTFGQGTKLEIKRTVAAPSVFIFPPSDEQLKSGTASVVCLLNNFYPREAK
VQWKVDNALQSGNSQESVTEQDSKDSTYSLSSTLTLSKADYEKHKVYACEVTHQGLSSPVTKSF
NRGEC] (SEQ ID NO: 302)
79. [Spacer (SEQ ID NO: 645)][huCD147 3A11 Lc1-419.4-2012 (SEQ
ID NO: 258)]
Amino acid sequence
[QGQSGQG][LHGPCHYDLKCGGGSSGGSISSGLLSGRSANPGGGSDIQMTQSPSSLSASVGDR
VTITCRASQSVRTDVGWYQQKPGKAPKLLIYYSSNRYTGVPSRFSGSGSGTDFTLTISSLQPED
FATYYCQQDYSSPYTFGQGTKLEIKRTVAAPSVFIFPPSDEQLKSGTASVVCLLNNFYPREAKV
QWKVDNALQSGNSQESVTEQDSKDSTYSLSSTLTLSKADYEKHKVYACEVTHQGLSSPVTKSFN
RGEC] (SEQ ID NO: 303)
80. [Spacer (SEQ ID NO: 645)][huCD147 3A11 Lc1-419.5-2012 (SEQ
ID NO: 259)]
Amino acid sequence
[QGQSGQG][LHGPCHYDLRCGGGSSGGSISSGLLSGRSANPGGGSDIQMTQSPSSLSASVGDR
VTITCRASQSVRTDVGWYQQKPGKAPKLLIYYSSNRYTGVPSRFSGSGSGTDFTLTISSLQPED
FATYYCQQDYSSPYTFGQGTKLEIKRTVAAPSVFIFPPSDEQLKSGTASVVCLLNNFYPREAKV
QWKVDNALQSGNSQESVTEQDSKDSTYSLSSTLTLSKADYEKHKVYACEVTHQGLSSPVTKSFN
RGEC] (SEQ ID NO: 304)
81. [Spacer (SEQ ID NO: 645)][huCD147 3A11 Lc1-440-2012 (SEQ ID
NO: 260)]
Amino acid sequence
[QGQSGQG][TCLHLTRFNYLSCNKGGGSSGGSISSGLLSGRSANPGGGSDIQMTQSPSSLSAS
VGDRVTITCRASQSVRTDVGWYQQKPGKAPKLLIYYSSNRYTGVPSRFSGSGSGTDFTLTISSL
QPEDFATYYCQQDYSSPYTFGQGTKLEIKRTVAAPSVFIFPPSDEQLKSGTASVVCLLNNFYPR
EAKVQWKVDNALQSGNSQESVTEQDSKDSTYSLSSTLTLSKADYEKHKVYACEVTHQGLSSPVT
KSFNRGEC] (SEQ ID NO: 305)
82. [Spacer (SEQ ID NO: 645)][huCD147 3A11 Lc1-440.1-2012 (SEQ
ID NO: 261)]
Amino acid sequence
[QGQSGQG][TCLHLTRFNYLSCGGGSSGGSISSGLLSGRSANPGGGSDIQMTQSPSSLSASVG
DRVTITCRASQSVRTDVGWYQQKPGKAPKLLIYYSSNRYTGVPSRFSGSGSGTDFTLTISSLQP
EDFATYYCQQDYSSPYTFGQGTKLEIKRTVAAPSVFIFPPSDEQLKSGTASVVCLLNNFYPREA
KVQWKVDNALQSGNSQESVTEQDSKDSTYSLSSTLTLSKADYEKHKVYACEVTHQGLSSPVTKS
FNRGEC] (SEQ ID NO: 306)
83. [Spacer (SEQ ID NO: 645)][huCD147 3A11 Lc1-440.1-2001 VL
domain (SEQ ID NO: 172)]
Amino acid sequence
[QGQSGQG][TCLHLTRFNYLSCGGGSSGGSISSGLLSGRSDNHGGGSDIQMTQSPSSLSASVG
DRVTITCRASQSVRTDVGWYQQKPGKAPKLLIYYSSNRYTGVPSRFSGSGSGTDFTLTISSLQP
EDFATYYCQQDYSSPYTFGQGTKLEIK] (SEQ ID NO: 217)
84. [Spacer (SEQ ID NO: 645)][huCD147 3A11 Lc1-440.1-3001 VL
domain (SEQ ID NO: 173)]
Amino acid sequence
[QGQSGQG][TCLHLTRFNYLSCGGGSSGGSAVGLLAPPGGLSGRSDNHGGSDIQMTQSPSSLS
ASVGDRVTITCRASQSVRTDVGWYQQKPGKAPKLLIYYSSNRYTGVPSRFSGSGSGTDFTLTIS
SLQPEDFATYYCQQDYSSPYTFGQGTKLEIK] (SEQ ID NO: 218)
85. [Spacer (SEQ ID NO: 645)][huCD147 3A11 Lc1-440.1-2007 VL
domain (SEQ ID NO: 174)]
Amino acid sequence
[QGQSGQG][TCLHLTRFNYLSCGGGSSGGSISSGLLSGRSDIHGGGSDIQMTQSPSSLSASVG
DRVTITCRASQSVRTDVGWYQQKPGKAPKLLIYYSSNRYTGVPSRFSGSGSGTDFTLTISSLQP
EDFATYYCQQDYSSPYTFGQGTKLEIK] (SEQ ID NO: 219)
86. [Spacer (SEQ ID NO: 645)][huCD147 3A11 Lc1-440.1-3007 VL
domain (SEQ ID NO: 175)]
Amino acid sequence
[QGQSGQG][TCLHLTRFNYLSCGGGSSGGSAVGLLAPPGGLSGRSDIHGGSDIQMTQSPSSLS
ASVGDRVTITCRASQSVRTDVGWYQQKPGKAPKLLIYYSSNRYTGVPSRFSGSGSGTDFTLTIS
SLQPEDFATYYCQQDYSSPYTFGQGTKLEIK] (SEQ ID NO: 220)
87. [Spacer (SEQ ID NO: 645)][huCD147 3A11 Lc1-440.1-2008 VL
domain (SEQ ID NO: 176)]
Amino acid sequence
[QGQSGQG][TCLHLTRFNYLSCGGGSSGGSISSGLLSGRSDQHGGGSDIQMTQSPSSLSASVG
DRVTITCRASQSVRTDVGWYQQKPGKAPKLLIYYSSNRYTGVPSRFSGSGSGTDFTLTISSLQP
EDFATYYCQQDYSSPYTFGQGTKLEIK] (SEQ ID NO: 221)
88. [Spacer (SEQ ID NO: 645)][huCD147 3A11 Lc1-440.1-3008 VL
domain (SEQ ID NO: 177)]
Amino acid sequence
[QGQSGQG][TCLHLTRFNYLSCGGGSSGGSAVGLLAPPGGLSGRSDQHGGSDIQMTQSPSSLS
ASVGDRVTITCRASQSVRTDVGWYQQKPGKAPKLLIYYSSNRYTGVPSRFSGSGSGTDFTLTIS
SLQPEDFATYYCQQDYSSPYTFGQGTKLEIK] (SEQ ID NO: 222)
89. [Spacer (SEQ ID NO: 645)][huCD147 3A11 Lc1-440.1-2011 VL
domain (SEQ ID NO: 178)]
Amino acid sequence
[QGQSGQG][TCLHLTRFNYLSCGGGSSGGSISSGLLSGRSDNPGGGSDIQMTQSPSSLSASVG
DRVTITCRASQSVRTDVGWYQQKPGKAPKLLIYYSSNRYTGVPSRFSGSGSGTDFTLTISSLQP
EDFATYYCQQDYSSPYTFGQGTKLEIK] (SEQ ID NO: 223)
90. [Spacer (SEQ ID NO: 645)][huCD147 3A11 Lc1-440.1-3011 VL
domain (SEQ ID NO: 179)]
Amino acid sequence
[QGQSGQG][TCLHLTRFNYLSCGGGSSGGSAVGLLAPPGGLSGRSDNPGGSDIQMTQSPSSLS
ASVGDRVTITCRASQSVRTDVGWYQQKPGKAPKLLIYYSSNRYTGVPSRFSGSGSGTDFTLTIS
SLQPEDFATYYCQQDYSSPYTFGQGTKLEIK] (SEQ ID NO: 224)
91. [Spacer (SEQ ID NO: 645)][huCD147 3A11 Lc1-440.1-3012 VL
domain (SEQ ID NO: 180)]
Amino acid sequence
[QGQSGQG][TCLHLTRFNYLSCGGGSSGGSAVGLLAPPGGLSGRSANPGGSDIQMTQSPSSLS
ASVGDRVTITCRASQSVRTDVGWYQQKPGKAPKLLIYYSSNRYTGVPSRFSGSGSGTDFTLTIS
SLQPEDFATYYCQQDYSSPYTFGQGTKLEIK] (SEQ ID NO: 225)
92. [Spacer (SEQ ID NO: 645)][huCD147 3A11 Lc1-440.1-2013 VL
domain (SEQ ID NO: 181)]
Amino acid sequence
[QGQSGQG][TCLHLTRFNYLSCGGGSSGGSISSGLLSGRSANIGGGSDIQMTQSPSSLSASVG
DRVTITCRASQSVRTDVGWYQQKPGKAPKLLIYYSSNRYTGVPSRFSGSGSGTDFTLTISSLQP
EDFATYYCQQDYSSPYTFGQGTKLEIK] (SEQ ID NO: 226)
93. [Spacer (SEQ ID NO: 645)][huCD147 3A11 Lc1-440.1-3013 VL
domain (SEQ ID NO: 182)]
Amino acid sequence
[QGQSGQG][TCLHLTRFNYLSCGGGSSGGSAVGLLAPPGGLSGRSANIGGSDIQMTQSPSSLS
ASVGDRVTITCRASQSVRTDVGWYQQKPGKAPKLLIYYSSNRYTGVPSRFSGSGSGTDFTLTIS
SLQPEDFATYYCQQDYSSPYTFGQGTKLEIK] (SEQ ID NO: 227)
94. [Spacer (SEQ ID NO: 645)][huCD147 3A11 Lc1-440.1-2001 (SEQ
ID NO: 262)]
Amino acid sequence
[QGQSGQG][TCLHLTRFNYLSCGGGSSGGSISSGLLSGRSDNHGGGSDIQMTQSPSSLSASVG
DRVTITCRASQSVRTDVGWYQQKPGKAPKLLIYYSSNRYTGVPSRFSGSGSGTDFTLTISSLQP
EDFATYYCQQDYSSPYTFGQGTKLEIKRTVAAPSVFIFPPSDEQLKSGTASVVCLLNNFYPREA
KVQWKVDNALQSGNSQESVTEQDSKDSTYSLSSTLTLSKADYEKHKVYACEVTHQGLSSPVTKS
FNRGEC] (SEQ ID NO: 307)
95. [Spacer (SEQ ID NO: 645)][huCD147 3A11 Lc1-440.1-3001 (SEQ
ID NO: 263)]
Amino acid sequence
[QGQSGQG][TCLHLTRFNYLSCGGGSSGGSAVGLLAPPGGLSGRSDNHGGSDIQMTQSPSSLS
ASVGDRVTITCRASQSVRTDVGWYQQKPGKAPKLLIYYSSNRYTGVPSRFSGSGSGTDFTLTIS
SLQPEDFATYYCQQDYSSPYTFGQGTKLEIKRTVAAPSVFIFPPSDEQLKSGTASVVCLLNNFY
PREAKVQWKVDNALQSGNSQESVTEQDSKDSTYSLSSTLTLSKADYEKHKVYACEVTHQGLSSP
VTKSFNRGEC] (SEQ ID NO: 308)
96. [Spacer (SEQ ID NO: 645)][huCD147 3A11 Lc1-440.1-2007 (SEQ
ID NO: 264)]
Amino acid sequence
[QGQSGQG][TCLHLTRFNYLSCGGGSSGGSISSGLLSGRSDIHGGGSDIQMTQSPSSLSASVG
DRVTITCRASQSVRTDVGWYQQKPGKAPKLLIYYSSNRYTGVPSRFSGSGSGTDFTLTISSLQP
EDFATYYCQQDYSSPYTFGQGTKLEIKRTVAAPSVFIFPPSDEQLKSGTASVVCLLNNFYPREA
KVQWKVDNALQSGNSQESVTEQDSKDSTYSLSSTLTLSKADYEKHKVYACEVTHQGLSSPVTKS
FNRGEC] (SEQ ID NO: 309)
97. [Spacer (SEQ ID NO: 645)][huCD147 3A11 Lc1-440.1-3007 (SEQ
ID NO: 265)]
Amino acid sequence
[QGQSGQG][TCLHLTRFNYLSCGGGSSGGSAVGLLAPPGGLSGRSDIHGGSDIQMTQSPSSLS
ASVGDRVTITCRASQSVRTDVGWYQQKPGKAPKLLIYYSSNRYTGVPSRFSGSGSGTDFTLTIS
SLQPEDFATYYCQQDYSSPYTFGQGTKLEIKRTVAAPSVFIFPPSDEQLKSGTASVVCLLNNFY
PREAKVQWKVDNALQSGNSQESVTEQDSKDSTYSLSSTLTLSKADYEKHKVYACEVTHQGLSSP
VTKSFNRGEC] (SEQ ID NO: 310)
98. [Spacer (SEQ ID NO: 645)][huCD147 3A11 Lc1-440.1-2008 (SEQ
ID NO: 266)]
Amino acid sequence
[QGQSGQG][TCLHLTRFNYLSCGGGSSGGSISSGLLSGRSDQHGGGSDIQMTQSPSSLSASVG
DRVTITCRASQSVRTDVGWYQQKPGKAPKLLIYYSSNRYTGVPSRFSGSGSGTDFTLTISSLQP
EDFATYYCQQDYSSPYTFGQGTKLEIKRTVAAPSVFIFPPSDEQLKSGTASVVCLLNNFYPREA
KVQWKVDNALQSGNSQESVTEQDSKDSTYSLSSTLTLSKADYEKHKVYACEVTHQGLSSPVTKS
FNRGEC] (SEQ ID NO: 311)
99. [Spacer (SEQ ID NO: 645)][huCD147 3A11 Lc1-440.1-3008 (SEQ
ID NO: 267)]
Amino acid sequence
[QGQSGQG][TCLHLTRFNYLSCGGGSSGGSAVGLLAPPGGLSGRSDQHGGSDIQMTQSPSSLS
ASVGDRVTITCRASQSVRTDVGWYQQKPGKAPKLLIYYSSNRYTGVPSRFSGSGSGTDFTLTIS
SLQPEDFATYYCQQDYSSPYTFGQGTKLEIKRTVAAPSVFIFPPSDEQLKSGTASVVCLLNNFY
PREAKVQWKVDNALQSGNSQESVTEQDSKDSTYSLSSTLTLSKADYEKHKVYACEVTHQGLSSP
VTKSFNRGEC] (SEQ ID NO: 312)
100. [Spacer (SEQ ID NO: 645)][huCD147 3A11 Lc1-440.1-2011 (SEQ
ID NO: 268)]
Amino acid sequence
[QGQSGQG][TCLHLTRFNYLSCGGGSSGGSISSGLLSGRSDNPGGGSDIQMTQSPSSLSASVG
DRVTITCRASQSVRTDVGWYQQKPGKAPKLLIYYSSNRYTGVPSRFSGSGSGTDFTLTISSLQP
EDFATYYCQQDYSSPYTFGQGTKLEIKRTVAAPSVFIFPPSDEQLKSGTASVVCLLNNFYPREA
KVQWKVDNALQSGNSQESVTEQDSKDSTYSLSSTLTLSKADYEKHKVYACEVTHQGLSSPVTKS
FNRGEC] (SEQ ID NO: 313)
101. [Spacer (SEQ ID NO: 645)][huCD147 3A11 Lc1-440.1-3011 (SEQ
ID NO: 269)]
Amino acid sequence
[QGQSGQG][TCLHLTRFNYLSCGGGSSGGSAVGLLAPPGGLSGRSDNPGGSDIQMTQSPSSLS
ASVGDRVTITCRASQSVRTDVGWYQQKPGKAPKLLIYYSSNRYTGVPSRFSGSGSGTDFTLTIS
SLQPEDFATYYCQQDYSSPYTFGQGTKLEIKRTVAAPSVFIFPPSDEQLKSGTASVVCLLNNFY
PREAKVQWKVDNALQSGNSQESVTEQDSKDSTYSLSSTLTLSKADYEKHKVYACEVTHQGLSSP
VTKSFNRGEC] (SEQ ID NO: 314)
102. [Spacer (SEQ ID NO: 645)][huCD147 3A11 Lc1-440.1-3012 (SEQ
ID NO: 270)]
Amino acid sequence
[QGQSGQG][TCLHLTRFNYLSCGGGSSGGSAVGLLAPPGGLSGRSANPGGSDIQMTQSPSSLS
ASVGDRVTITCRASQSVRTDVGWYQQKPGKAPKLLIYYSSNRYTGVPSRFSGSGSGTDFTLTIS
SLQPEDFATYYCQQDYSSPYTFGQGTKLEIKRTVAAPSVFIFPPSDEQLKSGTASVVCLLNNFY
PREAKVQWKVDNALQSGNSQESVTEODSKDSTYSLSSTLTLSKADYEKHKVYACEVTHQGLSSP
VTKSFNRGEC] (SEQ ID NO: 315)
103. [Spacer (SEQ ID NO: 645)][huCD147 3A11 Lc1-440.1-2013 (SEQ
ID NO: 271)]
Amino acid sequence
[QGQSGQG][TCLHLTRFNYLSCGGGSSGGSISSGLLSGRSANIGGGSDIQMTQSPSSLSASVG
DRVTITCRASQSVRTDVGWYQQKPGKAPKLLIYYSSNRYTGVPSRFSGSGSGTDFTLTISSLQP
EDFATYYCQQDYSSPYTFGQGTKLEIKRTVAAPSVFIFPPSDEQLKSGTASVVCLLNNFYPREA
KVQWKVDNALQSGNSQESVTEQDSKDSTYSLSSTLTLSKADYEKHKVYACEVTHQGLSSPVTKS
FNRGEC] (SEQ ID NO: 316)
104. [Spacer (SEQ ID NO: 645)][huCD147 3A11 Lc1-440.1-3013 (SEQ
ID NO: 272)]
Amino acid sequence
[QGQSGQG][TCLHLTRFNYLSCGGGSSGGSAVGLLAPPGGLSGRSANIGGSDIQMTQSPSSLS
ASYGDRVTITCRASQSVRTDVGWYQQKPGKAPKLLIYYSSNRYTGVPSRFSGSGSGTDFTLTIS
SLQPEDFATYYCQQDYSSPYTFGQGTKLEIKRTVAAPSVFIFPPSDEQLKSGTASVVCLLNNFY
PREAKVQWKVDNALQSGNSQESVTEODSKDSTYSLSSTLTLSKADYEKHKVYACEVTHQGLSSP
VTKSFNRGEC] (SEQ ID NO: 317)

[0616] As shown in FIGS. 7A, 7B, and 7C, the binding affinity of anti-human CD147 activatable antibodies of the present disclosure to human CD147 polypeptide were assayed using an ELISA. The activatable antibodies of the present disclosure that were assayed by ELISA for binding to human CD147 polypeptide in the exemplary study depicted in FIG. 7A were (a) hu 3A11 Hc1/Lc1-414-3001 (VL of SEQ ID NO: 145 and VH of SEQ ID NO: 1), (b) hu 3A11 Hc1/Lc1-414.1-3001 (VL of SEQ ID NO: 157 and VH of SEQ ID NO: 1), (c) hu 3A11 Hc1/Lc1-414.2-3001 (VL of SEQ ID NO: 158 and VH of SEQ ID NO: 1), (d) hu 3A11 Hc1/Lc1-414.3-3001 (VL of SEQ ID NO: 159 and VH of SEQ ID NO: 1), (e) hu 3A11 He 1/Lc1-419.1-3001 (VL of SEQ ID NO: 160 and VH of SEQ ID NO: 1), (f) hu 3A11 Hc1/Lc1-419.2-3001 (VL of SEQ ID NO: 161 and VH of SEQ ID NO: 1), (g) hu 3A11 Hc1/Lc1-419.3-3001 (VL of SEQ ID NO: 162 and VH of SEQ ID NO: 1), with humanized anti-human CD147 3A11 antibody of the present disclosure (VL of SEQ ID NO: 5 and VH of SEQ ID NO: 1) also assayed.

[0617] The activatable antibodies of the present disclosure that were assayed by ELISA for binding to human CD147 polypeptide in the exemplary study depicted in FIG. 7B were (a) hu 3A11 Hc1/Lc1-414.3-2012 (VL of SEQ ID NO: 163 and VH of SEQ ID NO: 1), (b) hu 3A11 Hc1/Lc1-414.4-2012 (VL of SEQ ID NO: 164 and VH of SEQ ID NO: 1), (c) hu 3A11 He 1/Lc1-415-2012 (VL of SEQ ID NO: 165 and VH of SEQ ID NO: 1), (d) hu 3A11 Hc1/Lc1-415.1-2012 (VL of SEQ ID NO: 166 and VH of SEQ ID NO: 1), and (e) hu 3A11 Hc1/Lc1-419.3-2012 (VL of SEQ ID NO: 167 and VH of SEQ ID NO: 1), with humanized anti-human CD147 3A11 antibody of the present disclosure (VL of SEQ ID NO: 5 and VH of SEQ ID NO: 1) also assayed.

[0618] The activatable antibodies of the present disclosure that were assayed by ELISA for binding to human CD147 polypeptide in the exemplary study depicted in FIG. 7C were (a) hu 3A11 Hc1/Lc1-419.4-2012 (VL of SEQ ID NO: 168 and VH of SEQ ID NO: 1), (b) hu 3A11 Hc1/Lc1-419.5-2012 (VL of SEQ ID NO: 169 and VH of SEQ ID NO: 1), (c) hu 3A11 Hc1/Lc1-440-2012 (VL of SEQ ID NO: 170 and VH of SEQ ID NO: 1), and (d) hu 3A11 Hc1/Lc1-440.1-2012 (VL of SEQ ID NO: 171 and VH of SEQ ID NO: 1), with humanized anti-human CD147 3A11 antibody of the present disclosure (VL of SEQ ID NO: 5 and VH of SEQ ID NO: 1) also assayed.

[0619] For the exemplary assay depicted in FIGS. 7A-7C, standard ELISA protocol was used, in which human CD147 protein was absorbed to ELISA plates and subsequently incubated with the indicated concentration of antibody of the present disclosure. Bound humanized activatable antibody of the present disclosure was detected with anti-human Fab-peroxidase secondary antibody and Ultra TMB detection (Thermo Fisher Scientific). The apparent dissociation constants of this exemplary binding study are shown in Table 21.

TABLE 21
Equilibrium Dissociation Constants of Anti-human CD147
Activatable Antibodies To Human CD147

| Ab | K_{D} (nM) |
|---|---|
| hu 3A11 (Lc1/Hc1) | 0.45 |
| hu 3A11-414-3001 | 24.69 |
| hu 3A11-414.1-3001 | 13.76 |
| hu 3A11-414.2-3001 | 15.65 |
| hu 3A11-414.3-3001 | 20.23 |
| hu 3A11-419.1-3001 | 43.97 |
| hu 3A11-419.2-3001 | 20.76 |
| hu 3A11-419.3-3001 | 73.5 |
| hu 3A11-414.3-2012 | 5.92 |
| hu 3A11-414.4-2012 | 6.73 |
| hu 3A11-415-2012 | 1.43 |
| hu 3A11-415.1-2012 | 4.68 |
| hu 3A11-419.3-2012 | 10.0 |
| hu 3A11 (Hc1/Lc1) | 0.59 |

### Example 5. CD147 Expression in Multiple Primary and Metastatic Tumors

[0620] This Example shows that CD147 is expressed in a large variety of primary and metastatic tumor types by immunohistochemical (IHC) staining using an anti-human CD147 antibody.

[0621] Table 22 shows that CD147 is highly expressed in a large number of primary and metastatic tumor samples, using IHC staining with an anti-human CD147 antibody on multiple primary tumors and metastatic tissue microarrays (TMA). In this exemplary study, human CD147 was detected using mouse monoclonal anti-human CD147 antibody (clone MEM-M6/1, Abcam code ab78106) at 10 ug/ml after standard heat-induced epitope retrieval method in sodium citrate buffer (10 mM sodium citrate, 0.05% Tween-20, pH 6.0).

TABLE 22
CD147 Expression Level By Immunohistochemistry (IHC)

| | | | % of cores with moderate |
|---|---|---|---|
| | | # of cores | or strong CD147 IHC |
| | | analyzed | staining |
| Breast | Overall | 144 | 61% |
| | Her2+ | 26 | 65% |
| | ER+ | 12 | 42% |
| | TNBC | 62 | 66% |
| | Metastatic | 44 | 79% |
| Prostate | Overall | 71 | 68% |
| Lung | Overall | 70 | 84% |
| | Adeno NSCLC | 21 | 81% |
| | Squamous | 31 | 90% |
| | NSCLC | | |
| Esophageal | Overall | 97 | 91% |
| Head & | Overall | 69 | 94% |
| Neck | | | |
| Colon | Overall | 57 | 69% |

### Example 6. CD147 Expression in Multiple Primary and Metastatic Tumors

[0622] This Example shows that CD147 is expressed in a variety of patient-derived primary tumor types by immunohistochemical (IHC) staining using an anti-human CD147 antibody.

[0623] FIGS. 8A, 8B, 8C, and 8D show that CD147 is highly expressed in a large number of primary and metastatic tumor samples, using IHC staining with a commercially-purchased anti-human CD147 antibody on multiple primary tumors and metastatic tissue microarrays (TMA). FIG. 8A shows that CD147 is moderately or highly expressed in a large number and variety of patient-derived metastatic tumor samples, using IHC staining with a commercially-purchased anti-human CD147 mouse monoclonal antibody (clone MEM-M6/1, Abcam code ab78106) on multiple patient-derived tumor tissue microarrays (TMA). FIG. 8A shows a summary of the level of IHC staining of CD147 of the TMAs shows that a large number of cores derived from multiple patient-derived metastatic samples showed a strong CD147 signal.

[0624] FIGS. 8B, 8C, and 8D show an IHC staining with a commercially-purchased anti-human CD147 mouse monoclonal antibody (clone MEM-M6/1, Abcam code ab78106) in head-neck squamous cell carcinoma cancer (FIG. 8B), esophageal cancer (FIG. 8C), and non-small cell lung cancer (FIG. 8D). FIGS. 8B, 8C, and 8D show that these exemplary cancer types demonstrate a high level of CD147 signal.

### Example 7: CD147 Expression and Sensitivity to Anti-Human CD147-Mediated Cytotoxicity In Multiple Cell Lines

[0625] This Example shows that CD147 is expressed in high levels in many tumor-derived cell lines, and that many of these cell lines demonstrated sensitivity to anti-human CD147-targeted cytotoxicity.

[0626] FIG. 9 shows the maximum binding or relative expression of CD147 in the indicated cell lines by FACS analysis. FACS staining was carried out using the 3A11 anti-human CD147 antibody of the present disclosure (VH of SEQ ID NO: 1, VL of SEQ ID NO: 5), followed by an Alexa Fluor 647 conjugated goat anti mouse secondary antibody, with the height of the bar for a given cell line corresponding to the relative amount of CD147-derived signal and number of cell-surface receptors for anti-human CD147 for that cell line. The color of the bar for a given cell line shows the relative sensitivity of the corresponding cell line in an in vitro cytotoxicity assay where the cell line was treated with anti-human CD147 antibody of the present disclosure (VH of SEQ ID NO: 1, VL of SEQ ID NO: 5) in the presence of an anti-human secondary antibody conjugated to vc-MMAE toxin. A cell line was categorized as showing “potent” cytotoxicity when treated with the combined anti-human CD147 antibody and secondary antibody drug conjugate if the EC50 of less than 1 nM was observed upon treatment with the combined antibody drug conjugate. A cell line was categorized as showing “moderate” cytotoxicity when treated with combined anti-human CD147 antibody and secondary antibody drug conjugate if the EC50 of between 5 nM and 1 nM was observed upon treatment with the combined antibody drug conjugate. FIG. 9 shows that an anti-human CD147 drug conjugate of the present invention demonstrated potent or moderate cytotoxicity against multiple cancer-derived cell lines. In certain embodiments, the anti-human CD147 antibody drug conjugate of the present invention demonstrated potent or moderate cytotoxicity against forty-four (44) of fifty-nine (59) cancer-derived cell lines tested. In certain embodiments, the anti-human CD147 antibody drug conjugate of the present invention demonstrated potent or moderate cytotoxicity against cancer cell lines derived from breast cancer, colorectal cancer, esophageal cancer, gastric cancer, head and neck squamous cell carcinoma, non-small cell lung cancer, mesothelioma, esophageal cancer, ovarian cancer, pancreatic cancer, and prostate cancer. A list of the cell lines tested, their tissue(s) of origin, and the observed EC50 is shown below in Table 23.

TABLE 23
In Vitro Cytotoxieity of Anti-human CD147 Antibody Drug Conjugate
To Various Cell Lines

| | | EC50 (nM) |
|---|---|---|
| | Tissue/Cancer Type | [NC = no kill |
| Cell Line | of Origin | observed] |
| RT11-2/84 | Bladder cancer | 1.94 |
| SKBR3 | Breast (Her2+) | 0.38 |
| HCC 1806 | Breast (TNBC) | 0.68 |
| HCC 70 | Breast (TNBC) | 0.94 |
| HCC1143 | Breast (TNBC) | <1.0 |
| HCC1937 | Breast (TNBC) | <1.0 |
| HCC1954 | Breast (TNBC) | <1.0 |
| HT29 (WIDR) | CRC | 0.87 |
| DLD-1 | CRC | NC |
| HCT 116 | CRC | 1.8 |
| LOVO | CRC | <1.0 |
| LS174T | CRC | ~1 |
| LS411N | CRC | <1.0 |
| SW1417 | CRC | 0.8 |
| sw48 | CRC | <1.0 |
| sw480 | CRC | <1.0 |
| WIDR (derived from | CRC | |
| HT29) | | |
| AGS | gastric adenocarcinoma | 0.09 |
| SK-GT-4 | gastric adenocarcinoma | <0.1 |
| | fundus, well | |
| | differentiated | |
| SNU-1 | gastric carcinoma | 0.21 |
| SNU-16 | gastric carcinoma | 1.14 |
| SNU-5 | gastric carcinoma | 0.11 |
| ESO26 | gastroeoesophageal | 0.06 |
| | junction | |
| | adenocarcinoma | |
| BHY | HNSCC | <1.0 |
| Detroit562 | HNSCC | 0.008 |
| KYSE150 | HNSCC | 0.88 |
| KYSE70 | HNSCC | 0.13 |
| SCC1 | HNSCC | 0.14 |
| SCC25 | HNSCC | 0.2 |
| SCC9 | HNSCC | 0.37 |
| H1975 | Lung cancer | 0.09 |
| H292 | Lung cancer | 0.07 |
| H358 | Lung cancer | 0.09 |
| H520 | Lung cancer | 11.19 |
| H727 | Lung cancer | NC |
| H1581 | Lung (NSCLC) | 0.039 |
| H2444 | Lung (NSCLC) | 1.8 |
| H2141 | Lung (SCLC) | Ambiguous |
| H2405 | Lung (SCLC) | 0.3 |
| H526 | Lung (SCLC) | NC |
| H69 | Lung (SCLC) | ~1.0 |
| H889 | Lung (SCLC) | Ambiguous |
| H2052 | Mesothelioma | 0.03 |
| H226 | Mesothelioma | 0.45 |
| H2452 | Mesothelioma | 0.94 |
| MSTO-211H | Mesothelioma | 0.37 |
| FLO-1 | oeoesophageal distal | 0.51 |
| | adenocarcinoma | |
| KYSE410 | oeoesophageal | 1.35 |
| | squamous cell | |
| | carcinoma | |
| OE33 | oesophageal carcinoma | 0.29 |
| OACM5.1 C | oesophagus distal | 1.1 |
| | adenocarcinoma C | |
| | Barretts | |
| EFO-21 | Ovarian cancer | 1.4 |
| SKOV3 | Ovarian cancer | 0.95 |
| aspc1 | Pancreatic cancer | 20.5 |
| HPAC | Pancreatic cancer | 0.21 |
| HPAF2 | Pancreatic cancer | <1.0 |
| H5766T | Pancreatic cancer | Ambiguous |
| miapaca1 | Pancreatic cancer | 0.65 |
| PC3 | Prostate cancer | <1.0 |
| A253 | Salivary gland cancer | <1.0 |
| Hs 746T | stomach carcinoma | 0.06 |

TNBC = triple-negative breast cancer;
NSCLC = non-small cell lung cancer;
SCLC = small cell lung cancer;
HNSCC = head & neck squamous cell carcinoma;
CRC = colorectal cancer

### Example 8: Anti-Human CD147 Binding to Human and Cynomolgus CD147

[0627] This Example shows that anti-human CD147 antibodies of the present disclosure bind CD147 on human and cynomolgus cell lines with similar relative affinities.

[0628] FIG. 10 shows the binding affinity of hu3A11 anti-human CD147 antibody of the present disclosure (VH of SEQ ID NO: 1, VL of SEQ ID NO: 5) to the human KYSE-70 esophageal epithelial cell line and the cynomolgus primary kidney epithelial cell line. In this study, the binding of the humanized anti-human CD147 antibody of the present disclosure to the indicated cell lines were performed using a standard FACS labelling method. Briefly, cells were labeled with the indicated antibodies of the present disclosure: anti-human CD147 antibody (humanized anti-human CD147 hu3A11 antibody; VH of SEQ ID NO: 1, VL of SEQ ID NO: 5) at the indicated concentrations and subsequently detected with an Alexa Fluor 647 labeled goat anti-human IgG secondary antibody. These results show that anti-human CD147 hu3A11 antibody binds the human cell line with a K_{D} of 1.654 nM, which is similar to the affinity of the antibody to the cynomolgus cell line (K_{D} of 1.297 nM).

### Example 9: Anti-Human CD147 Activatable Antibody Drug Conjugates Binding Activity and Cytotoxicity

[0629] Binding of anti-human CD147 activatable antibody drug conjugates of the present disclosure to the NCI H292 (also referred to herein as H292) cell line was evaluated using FACS. Briefly, cells were incubated with huCD147 activatable antibody drug conjugates (or activatable antibody at the indicated concentrations and subsequently detected with an Alexa Fluor 647 labeled goat anti-human IgG secondary antibody. As shown in FIG. 11A, intact anti-human CD147 activatable antibody drug conjugates (anti-human CD147 hu3A11-440.1-2012-spdb-DM4, VH of SEQ ID NO: 1, VL of SEQ ID NO: 171) of the present disclosure show an affinity of K_{d}>100 nM to H292 cells (FIG. 11A). When the anti-human CD147 AADC of the present disclosure is treated with a protease (matriptase), the binding affinity of the proteolytically-activated anti-human CD147 AADC significantly increases.

[0630] FIG. 11B shows the ability of activated anti-human CD147 activatable antibody conjugated to DM4 (anti-human CD147 hu3A11-440.1-2012-spdb-DM4, VH of SEQ ID NO: 1, VL of SEQ ID NO: 171) to kill cells in vitro with an EC50 higher than that of intact anti-human CD147 activatable antibody conjugated to DM4. The cytotoxicity of the intact anti-human CD147 activatable antibody conjugated to DM4 was similar to that of an isotype antibody conjugated to DM4. The EC50 are summarized in Table 24 below.

TABLE 24
In Vitro Cytotoxicity of Anti-human CD147 Activatable Antibodies
To Human H292 Cells

| Ab | K_{D} (nM) |
|---|---|
| Isotype-spdb-DM4 | 1286 |
| hu 3A11-440.1-2012-spdb-DM4 | 408 |
| hu 3A11-440.1-2012-spdb-DM4 + | 0.18 |
| matriptase | |

### Example 10: Activatable Anti-Human CD147-AADC In Vivo Efficacy in HT29 and H292 Xenograft Models

[0631] This Example shows that anti-human CD147 activatable antibodies with conjugated toxins (AADCs) of the present disclosure are efficacious in a mouse xenograft model compared to a vehicle control.

[0632] FIGS. 12A and 12B shows the efficacy of an anti-human CD147 activatable antibody drug conjugates (anti-human CD147 hu3A11-440.1-2012-DM4, VH of SEQ ID NO: 1, VL of SEQ ID NO: 171) in a mouse H292 (NSCLC) xenograft model (FIG. 12A) and a mouse HT29 (CRC) xenograft model (FIG. 12B). Tumors were grown to an average of 150 mm³; then the mice were randomized into different groups and dosed on day 0 with the indicated test articles. Mean tumor volume±SEM for each group is plotted. The activatable antibody drug conjugates of the present disclosure (anti-human CD147 hu3A11-440.1-2012-DM4, VH of SEQ ID NO: 1, VL of SEQ ID NO: 171) administered at 2.5 mg/kg or 5 mg/kg showed significantly higher efficacy than a vehicle control. Mean tumor volume±SEM for each group is plotted. Both the ADC and AADC induce tumor regressions.

### Example 11: In Vivo Toxicity of Anti-Human CD147-AADC in Cynomolgus Monkeys

[0633] The tolerability of intact anti-human CD147 activatable antibody conjugated to DM4 (AADC) and anti-human CD147 antibody conjugated to DM4 (ADC) in cynomolgus monkeys was evaluated after a single 5 mg/kg dose (FIGS. 13A to 13D).

[0634] The studies depicted in FIGS. 13A to 13D were conducted as part of a 3 week tolerability study (non-terminal); single dose n=2. In this study, a single dose of intact activatable anti-human CD147 hu3A11-440.1-2012-spdb-DM4 (“AADC”) (anti-human CD147 hu3A11-440.1-2012-spdb-DM4, VH of SEQ ID NO: 1, VL of SEQ ID NO: 171) of the present disclosure having a drug-antibody ratio (DAR) of about 4.1 was dosed in cynomolgus monkeys at 4.4 mg/kg and anti-human CD147 hu3A11-spdb-DM4 (“ADC”) (anti-human CD147 hu3A11-spdb-DM4, VH of SEQ ID NO: 1, VL of SEQ ID NO: 5) of the present disclosure having a DAR of about 3.6 was dosed at 5 mg/kg. The conjugated activatable antibody was well tolerated at 5 mg/mg. No evidence of on or off-target toxicity was observed. There were no clinical signs, weight loss, clinical chemistry or hematologic findings.

[0635] FIGS. 13A-13D show that anti-human CD147 activatable antibody drug conjugates (AADCs) of the present disclosure (anti-human CD147 hu3A11-440.1-2012-spdb-DM4, VH of SEQ ID NO: 1, VL of SEQ ID NO: 171) demonstrate a higher tolerance in cynomolgus monkeys based on an absence of marked changes in each hematology readout and liver toxicity, as compared to monkeys treated with the corresponding parental anti-human CD147 ADC (anti-human CD147 hu3A11-spdb-DM4, VH of SEQ ID NO: 1, VL of SEQ ID NO: 5). In particular, monkeys treated with 5 mg/kg of the parental anti-human CD147 ADC showed higher levels liver toxicity based on levels of alanine transaminase (ALT) (FIG. 13A), severe neutropenia based on neutrophil counts (FIG. 13B), and decreased reticulocytes and monocytes (FIGS. 13C and 13D) as compared to monkeys treated with activatable anti-human CD147 AADCs of the present disclosure, which showed no marked changes in all of these hematological readouts (FIGS. 13A-13D).

### Example 12: In Vivo Pharmacokinetics and Tolerability of Anti-Human CD147-AADC and Anti-Human CD147 ADC in Cynomolgus Monkeys

[0636] The pharmacokinetics and tolerability in cynomolgus monkeys of an intact anti-human CD147 activatable antibody conjugated to DM4 (AADC) of the present disclosure and an anti-human CD147 antibody conjugated to DM4 (ADC) of the present disclosure were evaluated after a single 5 mg/kg dose of each was administered to male and female monkeys. The total serum level of human IgG was measured using an anti-human IgG sandwich ELISA using standard protocols.

[0637] FIG. 14 show the pharmacokinetics of the hu3A11-440.1-2012-DM4 (VH of SEQ ID NO: 1, VL of SEQ ID NO: 171) activatable antibody drug conjugate (AADC) and the hu3A11-DM4 (VH of SEQ ID NO: 1, VL of SEQ ID NO: 5) antibody drug conjugate (ADC) of the present disclosure in cynomolgus monkeys, demonstrating that the AADC had a significantly longer half-life in both the male and female animals that were studied relative to the ADC. The total serum level of human IgG was measured using an anti-human IgG sandwich ELISA using standard protocols. FIGS. 15A and 15B show that the conjugated activatable anti-human CD147 antibodies (AADC) of the present disclosure tested was well tolerated in that it did not trigger an increase in markers of liver function (based on levels of alanine transaminase (ALT)) or neutropenia (based on neutrophil counts) as compared to the conjugated anti-human CD147 antibody (ADC) tested.

### Example 13: In Vitro Binding Affinity of Anti-CD147 Antibody to Glycosylated and Deglycosylated CD147

[0638] An exemplary study of the in vitro binding affinity of anti-human CD147 antibodies of the present disclosure to CD147 antigen is presented herein. Native human CD147 includes three arginine (N—) glycosylation sites. Glycosylation of these sites can result in a high-glycosylation CD147 isoform (˜40-60 kDa with complex carbohydrates) and a low-glycosylation form (˜32 kDa with mannose).

[0639] In this example, recombinant human CD147-Fc chimeric protein (R&D Systems, cat. no. 927-EMN-050) was deglycosylated of N- and simple O-linked carbohydrates using the Protein Deglycosylation Mix II (˜16 hrs incubation at 37° C.; New England Biolabs, cat. no. P6044S) or the Enzymatic Protein Deglycosylation Kit (˜1.5 days+incubation at 37° C.; Sigma-Aldrich, cat. no. EDEGLY) in accordance with their respective protocols. The glycosylated CD147-Fc fusion protein was observed to migrate at ˜62 kDa, while the CD147-Fc fusion protein treated with either deglycosylation kit was observed to migrate at 52 and 48 kDa. Bovine fetuin, which includes both N- and O-linked carbohydrates, was used a control for the extent of deglycosylation.

[0640] After buffer exchange with PBS, the deglycosylated or glycosylated proteins were adsorbed onto ELISA plates at 1 μg/mL. As shown in FIG. 16, in vitro binding affinity of humanized anti-CD147 monoclonal antibody of the present disclosure (3A11 Lc1/Hc1 with VL of SEQ ID NO: 5 and VH of SEQ ID NO: 1) was determined using a standard ELISA protocol by incubating the adsorbed protein with the indicated concentration of the anti-CD147 humanized antibody of the present disclosure. Bound humanized antibody of the present disclosure was detected with anti-human Fab-peroxidase secondary antibody and the mouse 3A11 monoclonal antibody was detected with anti-mouse Fc-peroxidase secondary antibody, and Ultra TMB detection (Thermo Fisher Scientific). The apparent equilibrium dissociation constants (K_{D}) of this exemplary binding study are shown in Table 25.

TABLE 25
In Vitro Binding Affinity of Anti-human CD147 Antibodies
To Glycosylated and Deglycosylated Human CD147

| Antigen | Bₘₐₓ | K_{D} (nM) |
|---|---|---|
| CD147-Fc (glycosylated) | 3.095 | 0.1914 |
| CD147-Fc (deglyc-NEB) | 2.997 | 0.1851 |
| CD147-Fc (deglyc-Sigma) | 3.050 | 0.1753 |

[0641] These exemplary data demonstrate that the anti-CD147 humanized antibody of the present disclosure bound to glycosylated and deglycosylated CD147 antigen with comparable affinity.

[0642] While the invention has been described in conjunction with the detailed description thereof, the foregoing description is intended to illustrate and not limit the scope of the invention, which is defined by the scope of the appended claims. Other aspects, advantages, and modifications are within the scope of the following.

1. An isolated antibody or an antigen binding fragment thereof (AB) that specifically binds human CD147 and cynomolgus monkey CD147.

2. The isolated antibody of claim 1, wherein the AB comprises an amino acid sequence comprising amino acid sequences selected from the group consisting of:
(a) the VH CDR1 sequence GFTFSNYWMN (SEQ ID NO: 10) or GFTFSNYWMD (SEQ ID NO: 11); the VH CDR2 sequence EIRLKSYNYATH (SEQ ID NO: 12); the VH CDR3 sequence AGTDY (SEQ ID NO: 13); the VL CDR1 sequence KASQSVRTDVA (SEQ ID NO: 14) or RASQSVRTDVG (SEQ ID NO: 15); the VL CDR2 sequence YSSNRYT (SEQ ID NO: 16); and the VL CDR3 sequence QQDYSSPFT (SEQ ID NO: 17) or QQDYSSPYT (SEQ ID NO: 18),
(b) the VH CDR1 sequence GFTFSNYWMD (SEQ ID NO: 11); the VH CDR2 sequence EIRLKSYNYATH (SEQ ID NO: 12); the VH CDR3 sequence AGTDY (SEQ ID NO: 13); the VL CDR1 sequence RASQSVRTDVG (SEQ ID NO: 15); the VL CDR2 sequence YSSNRYT (SEQ ID NO: 16); and the VL CDR3 sequence QQDYSSPYT (SEQ ID NO: 18), and
(c) the VH CDR1 sequence GFTFSNYWMN (SEQ ID NO: 10); the VH CDR2 sequence EIRLKSYNYATH (SEQ ID NO: 12); the VH CDR3 sequence AGTDY (SEQ ID NO: 13); the VL CDR1 sequence KASQSVRTDVA (SEQ ID NO: 14); the VL CDR2 sequence YSSNRYT (SEQ ID NO: 16); and the VL CDR3 sequence QQDYSSPFT (SEQ ID NO: 17).

3. The isolated antibody of claim 1, wherein the AB comprises a heavy chain variable region comprising an amino acid sequence selected from the group consisting of SEQ ID NOs: 1-4, and a light chain variable region comprising an amino acid sequence selected from the group consisting of SEQ ID NOs: 5-9.

4. An isolated antibody or antigen binding fragment thereof that binds to the same epitope on human CD147 and/or cynomolgus monkey CD147 as the AB of claim 2.

5. An isolated antibody or antigen binding fragment thereof that inhibits the binding of the AB of claim 2 to human CD147 and/or cynomolgus monkey CD147.

6. An activatable antibody that, in an activated state, specifically binds to human CD147 and/or cynomolgus monkey CD147 comprising:
an antibody or an antigen binding fragment thereof (AB) that specifically binds to human CD147 and cynomolgus monkey CD147;
a masking moiety (MM) coupled to the AB, wherein the MM inhibits the binding of the AB to CD147 when the activatable antibody is in an uncleaved state; and
a cleavable moiety (CM) coupled to the AB, wherein the CM is a polypeptide that functions as a substrate for a protease.

7. The activatable antibody of claim 6, wherein the MM has one or more of the characteristics selected from the group consisting of:
(i) the MM has a dissociation constant for binding to the AB that is greater than the dissociation constant of the AB to CD147;
(ii) the MM does not interfere or compete with the AB for binding to CD147 when the activatable antibody is in a cleaved state;
(iii) the MM is a polypeptide of no more than 40 amino acids in length;
(iv) the MM polypeptide sequence is different from that of human CD147;
(v) the MM polypeptide sequence is no more than 50% identical to any natural binding partner of the AB; and
(vi) the MM comprises an amino acid sequence selected from the group consisting of SEQ ID NOs: 30-100.

8-13. (canceled)

14. The activatable antibody of claim 6, wherein the CM has one or more of the characteristics selected from the group consisting of:
(i) the CM is a substrate for a protease that is active in diseased tissue; and
(ii) the CM comprises an amino acid sequence selected from the group consisting of SEQ ID NOs: 356-423, 680-698, 713, 714, and 789-808.

15-16. (canceled)

17. The activatable antibody of claim 6, wherein the antigen binding fragment thereof is selected from the group consisting of a Fab fragment, a F(ab′)₂ fragment, a scFv, a scAb, a dAb, a single domain heavy chain antibody, and a single domain light chain antibody.

18. (canceled)

19. The activatable antibody of claim 6, wherein AB has one or more of the characteristics selected from the group consisting of:
(i) the AB comprises the VH CDR1 sequence GFTFSNYWMN (SEQ ID NO: 10) or GFTFSNYWMD (SEQ ID NO: 11); the VH CDR2 sequence EIRLKSYNYATH (SEQ ID NO: 12); the VH CDR3 sequence AGTDY (SEQ ID NO: 13); the VL CDR1 sequence KASQSVRTDVA (SEQ ID NO: 14) or RASQSVRTDVG (SEQ ID NO: 15); the VL CDR2 sequence YSSNRYT (SEQ ID NO: 16); and the VL CDR3 sequence QQDYSSPFT (SEQ ID NO: 17) or QQDYSSPYT (SEQ ID NO: 18); and
(ii) the AB comprises a heavy chain variable region comprising an amino acid sequence selected from the group consisting of SEQ ID NOs: 1-3, and a light chain variable region comprising an amino acid sequence selected from the group consisting of SEQ ID NOs: 5-8.

20. (canceled)

21. The activatable antibody of claim 6, wherein the AB is linked to the CM.

22. The activatable antibody of claim 6, wherein the AB is linked directly to the CM.

23. The activatable antibody of claim 6, wherein the AB is linked to the CM via a linking peptide.

24. The activatable antibody of claim 6, wherein the MM is linked to the CM such that the activatable antibody in an uncleaved state comprises the structural arrangement from N-terminus to C-terminus as follows: MM-CM-AB or AB-CM-MM.

25. The activatable antibody of claim 6, wherein the activatable antibody comprises a linking peptide between the MM and the CM, a linking peptide between the CM and the AB, or both a linking peptide between the MM and the CM and a linking peptide between the CM and the AB.

26. (canceled)

27. The activatable antibody of claim 6, wherein the activatable antibody comprises a first linking peptide (LP1) and a second linking peptide (LP2), and wherein the activatable antibody in the uncleaved state has the structural arrangement from N-terminus to C-terminus as follows: MM-LP1-CM-LP2-AB or AB-LP2-CM-LP1-MM.

28. The activatable antibody of claim 27, wherein the two linking peptides are not identical to each other.

29. The activatable antibody of claim 27, wherein each of LP1 and LP2 is a peptide of about 1 to 20 amino acids in length.

30. The activatable antibody of claim 6, wherein the activatable antibody has one or more of the characteristics selected from the group consisting of:
(a) the activatable antibody comprises the heavy chain sequence selected from the group consisting of SEQ ID NOs: 19-22 and a light chain comprising an amino acid sequence selected from the group consisting of SEQ ID NOs: 23-27, 230-272, and 275-317;
(b) the activatable antibody comprises a combination of amino acid sequences, wherein the combination of amino acid sequences is selected from a single row in Table 4, wherein for a given combination,
(i) the heavy chain of the AB comprises the amino acid sequences of the VH CDR sequences corresponding to the given combination in the single row listed in Table 4,
(ii) the light chain of the AB comprises the amino acid sequences of the VL CDR sequences corresponding to the given combination in the single row listed in Table 4,
(ii) the MM comprises the amino acid sequence of the mask sequence (MM) corresponding to the given combination in the single row listed in Table 4, and
(iv) the CM comprises the amino acid sequence of the substrate sequence (CM) corresponding to the given combination in the single row listed in Table 4; and
(c) the activatable antibody comprises a combination of amino acid sequences, wherein for a given combination of amino acid sequences,
(i) the heavy chain of the AB comprises the amino acid sequences of the VH sequence or VH CDR sequences selected from the group consisting of: the VH sequence or VH CDR sequences listed in the corresponding column of Table 5,
(ii) the light chain of the AB comprises the amino acid sequences of the VL sequence or VL CDR sequences selected from the group consisting of: the VL sequence or VL CDR sequences listed in the corresponding column of Table 5,
(iii) the MM comprises the amino acid sequence of the mask sequence (MM) selected from the group consisting of: the MM sequences listed in the corresponding column of Table 5, and
(iv) the CM comprises the amino acid sequence of the substrate sequence (CM) selected from the group consisting of: the CM sequences listed in the corresponding column of Table 5.

31-32. (canceled)

33. An activatable antibody comprising an antibody or an antigen binding fragment thereof (AB) that specifically binds to mammalian CD147, a MM, and a CM, wherein the activatable antibody has one or more of the following characteristics selected from the group consisting of:
(i) the activatable antibody comprises a heavy chain sequence comprising an amino acid sequence selected from the group consisting of SEQ ID NOs: 19-22; and
a light chain comprising an amino acid sequence selected from the group consisting of SEQ ID NOs: 23-27, 230-272, and 275-317;
(ii) the MM comprises an amino acid sequence selected from the group consisting of SEQ ID NOs: 30-100, and the CM comprises an amino acid sequence selected from the group consisting of SEQ ID NOs: 356-423, 680-698, 713, 714, and 789-808;
(iii) the AB comprises the VH CDR1 sequence GFTFSNYWMN (SEQ ID NO: 10) or GFTFSNYWMD (SEQ ID NO: 11); the VH CDR2 sequence EIRLKSYNYATH (SEQ ID NO: 12); the VH CDR3 sequence AGTDY (SEQ ID NO: 13); the VL CDR1 sequence KASQSVRTDVA (SEQ ID NO: 14) or RASQSVRTDVG (SEQ ID NO: 15); the VL CDR2 sequence YSSNRYT (SEQ ID NO: 16); and the VL CDR3 sequence QQDYSSPFT (SEQ ID NO: 17) or QQDYSSPYT (SEQ ID NO: 18);
(iv) the activatable antibody comprises a heavy chain variable region comprising an amino acid sequence selected from the group consisting of SEQ ID NOs: 1-3, and a light chain variable region comprising an amino acid sequence selected from the group consisting of SEQ ID NOs: 5-8, 140-182, and 185-227; and
(v) the AB comprises the VH CDR1 sequence GFTFSNYWMN (SEQ ID NO: 10) or GFTFSNYWMD (SEQ ID NO: 11); the VH CDR2 sequence EIRLKSYNYATH (SEQ ID NO: 12); the VH CDR3 sequence AGTDY (SEQ ID NO: 13); the VL CDR1 sequence KASQSVRTDVA (SEQ ID NO: 14) or RASQSVRTDVG (SEQ ID NO: 15); the VL CDR2 sequence YSSNRYT (SEQ ID NO: 16); and the VL CDR3 sequence QQDYSSPFT (SEQ ID NO: 17) or QQDYSSPYT (SEQ ID NO: 18), the MM comprises an amino acid sequence selected from the group consisting of SEQ ID NOs: 30-100, and the CM comprises an amino acid sequence selected from the group consisting of SEQ ID NOs: 356-423, 680-698, 713, 714, and 789-808.

34-37. (canceled)

38. An activatable anti-human CD147 antibody comprising
an antibody or an antigen binding fragment thereof (AB) that specifically binds to mammalian CD147, wherein the AB specifically binds to the same epitope on human CD147 and/or cynomolgus monkey CD147 as the isolated antibody of claim 2 or wherein the AB specifically cross-competes with the isolated antibody of claim 2 for binding to human CD147 and/or cynomolgus monkey CD147;
a masking moiety (MM) coupled to the AB that inhibits the binding of the AB to CD147 when the activatable antibody is in an uncleaved state; and
a cleavable moiety (CM) coupled to the AB, wherein the CM is a polypeptide that functions as a substrate for a protease.

39. (canceled)

40. A conjugated activatable antibody comprising the activatable antibody of claim 6 conjugated to an agent.

41. The conjugated activatable antibody of claim 40, wherein the agent has one or more of the characteristics selected from the group consisting of:
(a) the agent is a toxin or fragment thereof;
(b) the agent is a microtubule inhibitor;
(c) the agent is a nucleic acid damaging agent;
(d) the agent is a dolastatin or a derivative thereof;
(e) the agent is an auristatin or a derivative thereof;
(f) the agent is a maytansinoid or a derivative thereof;
(g) the agent is a duocarmycin or a derivative thereof;
(h) the agent is a calicheamicin or a derivative thereof;
(i) the agent is a pyrrolobenzodiazepine or a derivative thereof;
(i) the agent is auristatin E or a derivative thereof;
(k) the agent is monomethyl auristatin E (MMAE);
(l) the agent is monomethyl auristatin D (MMAD);
(m) the agent is the maytansinoid DM1;
(n) the agent is the maytansinoid DM4;
(o) the agent is a detectable moiety; and
(p) the agent is a diagnostic agent.

42-50. (canceled)

51. The conjugated activatable antibody of claim 40, wherein the agent is conjugated to the AB via a linker.

52. The conjugated activatable antibody of claim 40, wherein the linker with which the agent is conjugated to the AB comprises an SPDB moiety, a vc moiety, or a PEG2-vc moiety.

53. The conjugated activatable antibody of claim 40, wherein the agent is a toxin conjugated to the AB via a linker, and wherein the linker and the toxin conjugated to the AB comprise a moiety selected from the group consisting of: an SPDB-DM4 moiety, a vc-MMAD moiety, a vc-MMAE moiety, a vc-duocarmycin moiety, or a PEG2-vc-MMAD moiety.

54. The conjugated activatable antibody of claim 51, wherein the linker is a cleavable linker.

55. The conjugated activatable antibody of claim 51, wherein the linker is a non-cleavable linker.

56-57. (canceled)

58. A conjugated activatable antibody that, in an activated state, binds CD147 comprising:
(a) an activatable antibody comprising:
(i) an antibody or an antigen binding fragment thereof (AB) that specifically binds to human CD147 and/or cynomolgus monkey CD147;
(ii) a masking moiety (MM) coupled to the AB that inhibits the binding of the AB to CD147 when the activatable antibody is in an uncleaved state;
(iii) a cleavable moiety (CM) coupled to the AB, wherein the CM is a polypeptide that functions as a substrate for a protease; and
(b) an agent conjugated to the AB.

59. The conjugated activatable antibody of claim 58, wherein the agent is selected from the group consisting of a dolastatin or a derivative thereof, an auristatin or a derivative thereof, a maytansinoid or a derivative thereof, a duocarmycin or a derivative thereof, a calicheamicin or a derivative thereof, a pyrrolobenzodiazepine or a derivative thereof, auristatin E, monomethyl auristatin F (MMAF), monomethyl auristatin E (MMAE), monomethyl auristatin D (MMAD), maytansinoid DM4, maytansinoid DM1, a calicheamicin, a duocarmycin, a pyrrolobenzodiazepine, and a pyrrolobenzodiazepine dimer.

60. (canceled)

61. The conjugated activatable antibody of claim 58, wherein the agent is conjugated to the AB via a linker.

62. The conjugated activatable antibody of claim 58, wherein the linker with which the agent is conjugated to the AB comprises an SPDB moiety, a vc moiety, or a PEG2-vc moiety.

63. The conjugated activatable antibody of claim 58, wherein the agent is a toxin conjugated to the AB via a linker, and wherein the linker and the toxin conjugated to the AB comprise a moiety selected from the group consisting of: an SPDB-DM4 moiety, a vc-MMAD moiety, a vc-MMAE moiety, a vc-duocarmycin moiety, or a PEG2-vc-MMAD moiety.

64. The conjugated activatable antibody of claim 58, wherein the activatable antibody has one or more of the characteristics selected from the group consisting of:
(i) the activatable antibody comprises the VH CDR1 sequence GFTFSNYWMN (SEQ ID NO: 10) or GFTFSNYWMD (SEQ ID NO: 11); the VH CDR2 sequence EIRLKSYNYATH (SEQ ID NO: 12); the VH CDR3 sequence AGTDY (SEQ ID NO: 13); the VL CDR1 sequence KASQSVRTDVA (SEQ ID NO: 14) or RASQSVRTDVG (SEQ ID NO: 15); the VL CDR2 sequence YSSNRYT (SEQ ID NO: 16); and the VL CDR3 sequence QQDYSSPFT (SEQ ID NO: 17) or QQDYSSPYT (SEQ ID NO: 18);
(ii) the activatable antibody comprises a heavy chain variable region comprising an amino acid sequence selected from the group consisting of SEQ ID NOs: 1-3, and a light chain variable region comprising an amino acid sequence selected from the group consisting of SEQ ID NOs: 5-8, 140-182, and 185-227; and
(iii) the activatable antibody comprises the heavy chain comprising an amino acid sequence of SEQ ID NOs: 19-22 and a light chain comprising an amino acid sequence selected from the group consisting of SEQ ID NOs: 23-27, 230-272, and 275-317.

65. (canceled)

66. The conjugated activatable antibody of claim 58, wherein the MM comprises an amino acid sequence selected from the group consisting of SEQ ID NOs: 30-100.

67. (canceled)

68. The conjugated activatable antibody of claim 58, wherein the CM comprises an amino acid sequence selected from the group consisting of SEQ ID NOs: 356-423, 680-698, 713, 714, and 789-808.

69. (canceled)

70. The conjugated activatable antibody of claim 58, wherein the activatable antibody has one or more of the following characteristics selected from the group consisting of:
(i) the activatable antibody comprises a combination of amino acid sequences, wherein the combination of amino acid sequences is selected from a single row in Table 4,
wherein for a given combination,
(a) the heavy chain of the AB comprises the amino acid sequences of the VH CDR sequences corresponding to the given combination in the single row listed in Table 4,
(b) the light chain of the AB comprises the amino acid sequences of the VL CDR sequences corresponding to the given combination in the single row listed in Table 4,
(c) the MM comprises the amino acid sequence of the mask sequence (MM) corresponding to the given combination in the single row listed in Table 4, and
(d) the CM comprises the amino acid sequence of the substrate sequence (CM) corresponding to the given combination in the single row listed in Table 4; and
(ii) the activatable antibody comprises a combination of amino acid sequences, wherein for a given combination of amino acid sequences,
(a) the heavy chain of the AB comprises the amino acid sequences of the VH sequence or VH CDR sequences selected from the group consisting of: the VH sequence or VH CDR sequences listed in the corresponding column of Table 5,
(b) the light chain of the AB comprises the amino acid sequences of the VL sequence or VL CDR sequences selected from the group consisting of: the VL sequence or VL CDR sequences listed in the corresponding column of Table 5,
(c) the MM comprises the amino acid sequence of the mask sequence (MM) selected from the group consisting of: the MM sequences listed in the corresponding column of Table 5, and
(d) the CM comprises the amino acid sequence of the substrate sequence (CM) selected from the group consisting of: the CM sequences listed in the corresponding column of Table 5.

71-72. (canceled)

73. A conjugated antibody comprising:
(a) an antibody or an antigen binding fragment thereof (AB) that specifically binds to mammalian CD147, wherein the AB comprises:
(i) the VH CDR1 sequence GFTFSNYWMN (SEQ ID NO: 10) or GFTFSNYWMD (SEQ ID NO: 11); the VH CDR2 sequence EIRLKSYNYATH (SEQ ID NO: 12); the VH CDR3 sequence AGTDY (SEQ ID NO: 13); the VL CDR1 sequence KASQSVRTDVA (SEQ ID NO: 14) or RASQSVRTDVG (SEQ ID NO: 15); the VL CDR2 sequence YSSNRYT (SEQ ID NO: 16); and the VL CDR3 sequence QQDYSSPFT (SEQ ID NO: 17) or QQDYSSPYT (SEQ ID NO: 18), or
(ii) a heavy chain variable region comprising an amino acid sequence selected from the group consisting of SEQ ID NOs: 1-4, and a light chain variable region comprising an amino acid sequence selected from the group consisting of SEQ ID NOs: 5-9, 140-182, and 185-227 or
(iii) a heavy chain comprising an amino acid sequence selected from the group consisting of SEQ ID NOs: 19-22, and a light chain comprising an amino acid sequence selected from the group consisting of SEQ ID NOs: 23-27, 230-272, and 275-317;
(b) an agent conjugated to the AB, wherein the agent is selected from the group consisting of auristatin E, monomethyl auristatin F (MMAF), monomethyl auristatin E (MMAE), monomethyl auristatin D (MMAD), maytansinoid DM4, maytansinoid DM1, a pyrrolobenzodiazepine, a pyrrolobenzodiazepine dimer, a duocarmycin, and a calicheamicin.

74. A conjugated activatable antibody that, in an activated state, binds to CD147, comprising:
(a) an activatable antibody comprising:
(i) an antibody or an antigen binding fragment thereof (AB) that specifically binds to human CD147 and cynomolgus monkey CD147;
(ii) a masking moiety (MM) coupled to the AB that inhibits the binding of the AB to CD147 when the activatable antibody is in an uncleaved state;
(iii) a cleavable moiety (CM) coupled to the AB, wherein the CM is a polypeptide that functions as a substrate for a protease; and
(b) an agent conjugated to the AB,
wherein the activatable antibody comprises:
(i) the VH CDR1 sequence GFTFSNYWMN (SEQ ID NO: 10) or GFTFSNYWMD (SEQ ID NO: 11); the VH CDR2 sequence EIRLKSYNYATH (SEQ ID NO: 12); the VH CDR3 sequence AGTDY (SEQ ID NO: 13); the VL CDR1 sequence KASQSVRTDVA (SEQ ID NO: 14) or RASQSVRTDVG (SEQ ID NO: 15); the VL CDR2 sequence YSSNRYT (SEQ ID NO: 16); and the VL CDR3 sequence QQDYSSPFT (SEQ ID NO: 17) or QQDYSSPYT (SEQ ID NO: 18), or
(ii) a heavy chain variable region comprising an amino acid sequence selected from the group consisting of SEQ ID NOs: 1-4, and a light chain variable region comprising an amino acid sequence selected from the group consisting of SEQ ID NOs: 5-9, 140-182, and 185-227, or
(iii) a heavy chain comprising an amino acid sequence selected from the group consisting of SEQ ID NOs: 19-22, and a light chain comprising an amino acid sequence selected from the group consisting of SEQ ID NOs: 23-27, 230-272, and 275-317; and
wherein the agent is selected from the group consisting of auristatin E, monomethyl auristatin F (MMAF), monomethyl auristatin E (MMAE), monomethyl auristatin D (MMAD), maytansinoid DM4, maytansinoid DM1, a pyrrolobenzodiazepine, a pyrrolobenzodiazepine dimer, a duocarmycin, and a calicheamicin.

75. The conjugated activatable antibody of claim 74, wherein the MM comprises an amino acid sequence selected from the group consisting of SEQ ID NOs: 30-100.

76. (canceled)

77. The conjugated activatable antibody of claim 74, wherein the CM comprises an amino acid sequence selected from the group consisting of SEQ ID NOs: 356-423, 680-698, 713, 714, and 789-808.

78. (canceled)

79. The conjugated activatable antibody of claim 74, wherein the agent is conjugated to the AB via a linker, and wherein the linker to which the agent is conjugated to the AB comprises an SPDB moiety, a vc moiety, or a PEG2-vc moiety.

80. The conjugated activatable antibody of claim 74, wherein the agent is a toxin conjugated to the AB via a linker, and wherein the linker and the toxin conjugated to the AB comprise a moiety selected from the group consisting of: an SPDB-DM4 moiety, a vc-MMAD moiety, a vc-MMAE moiety, a vc-duocarmycin moiety, or a PEG2-vc-MMAD moiety.

81. A conjugated activatable antibody or conjugated antibody comprising:
an antibody or antigen binding fragment thereof (AB) that, in an activated state, binds CD147; and
a toxin conjugated to the AB via a linker,
wherein the conjugated activatable antibody or the conjugated antibody comprises amino acid sequences, a linker, and a toxin selected from a single row in Table 9, wherein for the given combination:
(a) the AB comprises a heavy chain comprising the amino acid sequence of the heavy chain sequence or heavy chain variable domain sequence corresponding to the given combination in the single row listed in Table 9,
(b) the AB comprises a light chain comprising the amino acid sequence of the light chain sequence or light chain variable domain sequence corresponding to the given combination in the single row listed in Table 9, and
(c) the linker and the toxin comprise the linker and the toxin corresponding to the given combination in the single row listed in Table 9.

82. A pharmaceutical composition comprising the activatable antibody of claim 6; and a carrier.

83. The pharmaceutical composition of claim 82 comprising an additional agent.

84. The pharmaceutical composition of claim 83, wherein the additional agent is a therapeutic agent.

85. An isolated nucleic acid molecule encoding the activatable antibody of claim 6.

86. A vector comprising the isolated nucleic acid molecule of claim 85.

87. A method of producing an antibody or an activatable antibody by culturing a cell under conditions that lead to expression of the antibody or the activatable antibody, wherein the cell comprises the nucleic acid molecule of claim 85.

88. A method of manufacturing an activatable antibody that, in an activated state, specifically binds CD147, the method comprising:
(a) culturing a cell comprising a nucleic acid construct that encodes the activatable antibody under conditions that lead to expression of the activatable antibody, wherein the activatable antibody comprises an activatable antibody of claim 6; and
(b) recovering the activatable antibody.

89. A method of treating, alleviating a symptom of, or delaying the progression of a disorder or disease in which diseased cells express CD147 comprising administering a therapeutically effective amount of the conjugated activatable antibody of claim 40 to a subject in need thereof.

90. The method of claim 89, wherein the disorder or disease is cancer.

91. A method of treating, alleviating a symptom of, or delaying the progression of a disorder or disease associated with cells expressing CD147 comprising administering a therapeutically effective amount of the conjugated activatable antibody of claim 40 to a subject in need thereof.

92. The method of claim 91, wherein the disorder or disease associated with cells expressing CD147 is cancer.

93. The method of claim 92, wherein the cancer is an adenocarcinoma, a bile duct (biliary) cancer, a bladder cancer, a bone cancer, a breast cancer, a triple-negative breast cancer, a Her2-negative breast cancer, a carcinoid cancer, a cervical cancer, a cholangiocarcinoma, a colorectal cancer, a colon cancer, an endometrial cancer, an esophageal cancer, a glioma, a head and neck cancer, a head and neck squamous cell cancer, a leukemia, a liver cancer, a lung cancer, a non-small cell lung cancer, a small cell lung cancer, a lymphoma, a melanoma, an oropharyngeal cancer, an ovarian cancer, a pancreatic cancer, a prostate cancer, a metastatic castration-resistant prostate carcinoma, a renal cancer, a sarcoma, a skin cancer, a squamous cell cancer, a stomach cancer, a testis cancer, a thyroid cancer, a urogenital cancer, or a urothelial cancer.

94. A method of inhibiting or reducing the growth, proliferation, or metastasis of cells expressing mammalian CD147 comprising administering a therapeutically effective amount of the conjugated activatable antibody of claim 40 to a subject in need thereof.

95. A method of inhibiting, blocking, or preventing the binding of a natural ligand to mammalian CD147, comprising administering a therapeutically effective amount of the conjugated activatable antibody of claim 40 to a subject in need thereof.

96. The method of any one of claim 95, wherein the expression and/or activity of the mammalian CD147 is aberrant.

97. The method of claim 89, wherein the method comprises administering an additional agent.

98. The method of claim 97, wherein the additional agent is a therapeutic agent.

99. The isolated antibody of claim 1, wherein the isolated antibody or antigen binding fragment thereof specifically binds to deglycosylated CD147 and glycosylated CD147.

100. The isolated antibody of claim 99, wherein the CD147 is human CD147.

101. The activatable antibody of claim 6, wherein the AB specifically binds to deglycosylated CD147 and glycosylated CD147.

102. The activatable antibody of claim 101, wherein the CD147 is human CD147.

103. A pharmaceutical composition comprising the conjugated activatable antibody of claim 40; and a carrier.

104. The pharmaceutical composition of claim 103 comprising an additional agent.

105. The pharmaceutical composition of claim 104, wherein the additional agent is a therapeutic agent.

The application's sequence listing, which the Patent Office published only in electronic form, follows.

SEQUENCE LISTING (1037 sequences)

SEQ ID NO: 1 - protein, 116 aa, Artificial Sequence
  huCD147 3A11 Hc1 VH domain
EVQLVESGGGLVQPGGSLRLSCAASGFTFSNYWMDWVRQAPGKGLEWVGEIRLKSYNYATHYAASVKGRFTISRDDSKNSVYLQMNSLKTEDTAVYYCTAAGTDYWGQGTLVTVSS

SEQ ID NO: 2 - protein, 116 aa, Artificial Sequence
  huCD147 3A11 Hc2 VH domain
EVQLVESGGGLVQPGGSLRLSCAASGFTFSNYWMNWVRQAPGKGLEWVGEIRLKSYNYATHYAASVKGRFTISRDDSKNSLYLQMNSLKTEDTAVYYCARAGTDYWGQGTLVTVSS

SEQ ID NO: 3 - protein, 116 aa, Artificial Sequence
  huCD147 3A11 Hc3 VH domain
EVQLVESGGGLVQPGGSLRLSCAASGFTFSNYWMNWVRQAPGKGLEWVGEIRLKSYNYATHYVASVKGRFTISRDDSKNSVYLQMNSLKTEDTAVYYCTAAGTDYWGQGTLLTVSS

SEQ ID NO: 4 - protein, 116 aa, Mus musculus; identical to SEQ ID NO: 1

SEQ ID NO: 5 - protein, 107 aa, Artificial Sequence
  huCD147 3A11 Lc1 VL domain
DIQMTQSPSSLSASVGDRVTITCRASQSVRTDVGWYQQKPGKAPKLLIYYSSNRYTGVPSRFSGSGSGTDFTLTISSLQPEDFATYYCQQDYSSPYTFGQGTKLEIK

SEQ ID NO: 6 - protein, 107 aa, Artificial Sequence
  huCD147 3A11 Lc2 VL domain
DIQMTQSPSSLSASVGDRVTITCKASQSVRTDVAWYQQKPGKAPKLLIYYSSNRYTGVPSRFSGSGSGTDFTLTISSLQPEDFATYYCQQDYSSPFTFGQGTKLEIK

SEQ ID NO: 7 - protein, 107 aa, Artificial Sequence
  huCD147 3A11 Lc3 VL domain
DIQMTQSPSSLSVSVGDRVTITCKASQSVRTDVAWYQQKPGKAPKLLIYYSSNRYTGVPSRFSGSGSGTDFTFTISSVQPEDFATYYCQQDYSSPFTFGQGTKLEIK

SEQ ID NO: 8 - protein, 107 aa, Artificial Sequence
  huCD147 3A11 Lc4 VL domain
DIQMTQSPSSLSVSVGDRVTITCKASQSVRTDVAWYQQKPGKAPKLLIYYSSNRYTGVPSRFSGSGYGTDFTFTISSVQPEDFATYYCQQDYSSPFTFGQGTKLEIK

SEQ ID NO: 9 - protein, 107 aa, Mus musculus
SIVMTQIPKILLVSAGDRVTITCKASQSVRTDVAWYQQKPGQSPKLLIYYSSNRYTGVPDRFTGSGYGTDFTFTISTVQAEDLAVYFCQQDYSSPFTFGSGTKLEIK

SEQ ID NO: 10 - protein, 10 aa, Artificial Sequence
  CD147 binding VH CDR1
GFTFSNYWMN

SEQ ID NO: 11 - protein, 10 aa, Artificial Sequence
  CD147 binding VH CDR1
GFTFSNYWMD

SEQ ID NO: 12 - protein, 12 aa, Artificial Sequence
  CD147 binding VH CDR2
EIRLKSYNYATH

SEQ ID NO: 13 - protein, 5 aa, Artificial Sequence
  CD147 binding VH CDR3
AGTDY

SEQ ID NO: 14 - protein, 11 aa, Artificial Sequence
  CD147 binding VL CDR1
KASQSVRTDVA

SEQ ID NO: 15 - protein, 11 aa, Artificial Sequence
  CD147 binding VL CDR1
RASQSVRTDVG

SEQ ID NO: 16 - protein, 7 aa, Artificial Sequence
  CD147 binding VL CDR2
YSSNRYT

SEQ ID NO: 17 - protein, 9 aa, Artificial Sequence
  CD147 binding VL CDR3
QQDYSSPFT

SEQ ID NO: 18 - protein, 9 aa, Artificial Sequence
  CD147 binding VL CDR3
QQDYSSPYT

SEQ ID NO: 19 - protein, 446 aa, Artificial Sequence
  huCD147 3A11 Hc1 Heavy Chain
EVQLVESGGGLVQPGGSLRLSCAASGFTFSNYWMDWVRQAPGKGLEWVGEIRLKSYNYATHYAASVKGRFTISRDDSKNSVYLQMNSLKTEDTAVYYCTAAGTDYWGQGTLVTVSSASTKGPSVFPLAPSSKSTSGGTAALGCLVKDYFPEPVTVSWNSGALTSGVHTFPAVLQSSGLYSLSSVVTVPSSSLGTQTYICNVNHKPSNTKVDKKVEPKSCDKTHTCPPCPAPELLGGPSVFLFPPKPKDTLMISRTPEVTCVVVDVSHEDPEVKFNWYVDGVEVHNAKTKPREEQYNSTYRVVSVLTVLHQDWLNGKEYKCKVSNKALPAPIEKTISKAKGQPREPQVYTLPPSREEMTKNQVSLTCLVKGFYPSDIAVEWESNGQPENNYKTTPPVLDSDGSFFLYSKLTVDKSRWQQGNVFSCSVMHEALHNHYTQKSLSLSPGK

SEQ ID NO: 20 - protein, 446 aa, Artificial Sequence
  huCD147 3A11 Hc2 Heavy Chain
EVQLVESGGGLVQPGGSLRLSCAASGFTFSNYWMNWVRQAPGKGLEWVGEIRLKSYNYATHYAASVKGRFTISRDDSKNSLYLQMNSLKTEDTAVYYCARAGTDYWGQGTLVTVSSASTKGPSVFPLAPSSKSTSGGTAALGCLVKDYFPEPVTVSWNSGALTSGVHTFPAVLQSSGLYSLSSVVTVPSSSLGTQTYICNVNHKPSNTKVDKKVEPKSCDKTHTCPPCPAPELLGGPSVFLFPPKPKDTLMISRTPEVTCVVVDVSHEDPEVKFNWYVDGVEVHNAKTKPREEQYNSTYRVVSVLTVLHQDWLNGKEYKCKVSNKALPAPIEKTISKAKGQPREPQVYTLPPSREEMTKNQVSLTCLVKGFYPSDIAVEWESNGQPENNYKTTPPVLDSDGSFFLYSKLTVDKSRWQQGNVFSCSVMHEALHNHYTQKSLSLSPGK

SEQ ID NO: 21 - protein, 446 aa, Artificial Sequence
  huCD147 3A11 Hc3 Light Chain
EVQLVESGGGLVQPGGSLRLSCAASGFTFSNYWMNWVRQAPGKGLEWVGEIRLKSYNYATHYVASVKGRFTISRDDSKNSVYLQMNSLKTEDTAVYYCTAAGTDYWGQGTLLTVSSASTKGPSVFPLAPSSKSTSGGTAALGCLVKDYFPEPVTVSWNSGALTSGVHTFPAVLQSSGLYSLSSVVTVPSSSLGTQTYICNVNHKPSNTKVDKKVEPKSCDKTHTCPPCPAPELLGGPSVFLFPPKPKDTLMISRTPEVTCVVVDVSHEDPEVKFNWYVDGVEVHNAKTKPREEQYNSTYRVVSVLTVLHQDWLNGKEYKCKVSNKALPAPIEKTISKAKGQPREPQVYTLPPSREEMTKNQVSLTCLVKGFYPSDIAVEWESNGQPENNYKTTPPVLDSDGSFFLYSKLTVDKSRWQQGNVFSCSVMHEALHNHYTQKSLSLSPGK

SEQ ID NO: 22 - skipped

SEQ ID NO: 23 - protein, 214 aa, Artificial Sequence
  huCD147 3A11 Lc1 Light Chain
DIQMTQSPSSLSASVGDRVTITCRASQSVRTDVGWYQQKPGKAPKLLIYYSSNRYTGVPSRFSGSGSGTDFTLTISSLQPEDFATYYCQQDYSSPYTFGQGTKLEIKRTVAAPSVFIFPPSDEQLKSGTASVVCLLNNFYPREAKVQWKVDNALQSGNSQESVTEQDSKDSTYSLSSTLTLSKADYEKHKVYACEVTHQGLSSPVTKSFNRGEC

SEQ ID NO: 24 - protein, 214 aa, Artificial Sequence
  huCD147 3A11 Lc2 Light Chain
DIQMTQSPSSLSASVGDRVTITCKASQSVRTDVAWYQQKPGKAPKLLIYYSSNRYTGVPSRFSGSGSGTDFTLTISSLQPEDFATYYCQQDYSSPFTFGQGTKLEIKRTVAAPSVFIFPPSDEQLKSGTASVVCLLNNFYPREAKVQWKVDNALQSGNSQESVTEQDSKDSTYSLSSTLTLSKADYEKHKVYACEVTHQGLSSPVTKSFNRGEC

SEQ ID NO: 25 - protein, 214 aa, Artificial Sequence
  huCD147 3A11 Lc3 Light Chain
DIQMTQSPSSLSVSVGDRVTITCKASQSVRTDVAWYQQKPGKAPKLLIYYSSNRYTGVPSRFSGSGSGTDFTFTISSVQPEDFATYYCQQDYSSPFTFGQGTKLEIKRTVAAPSVFIFPPSDEQLKSGTASVVCLLNNFYPREAKVQWKVDNALQSGNSQESVTEQDSKDSTYSLSSTLTLSKADYEKHKVYACEVTHQGLSSPVTKSFNRGEC

SEQ ID NO: 26 - protein, 214 aa, Artificial Sequence
  huCD147 3A11 Lc4 Light Chain
DIQMTQSPSSLSVSVGDRVTITCKASQSVRTDVAWYQQKPGKAPKLLIYYSSNRYTGVPSRFSGSGYGTDFTFTISSVQPEDFATYYCQQDYSSPFTFGQGTKLEIKRTVAAPSVFIFPPSDEQLKSGTASVVCLLNNFYPREAKVQWKVDNALQSGNSQESVTEQDSKDSTYSLSSTLTLSKADYEKHKVYACEVTHQGLSSPVTKSFNRGEC

SEQ ID NO: 27-29 - skipped (3 entries)

SEQ ID NO: 30 - protein, 15 aa, Artificial Sequence
  masking moiety
RYQSCHSYWCTEGNH

SEQ ID NO: 31 - protein, 15 aa, Artificial Sequence
  masking moiety
QSLFCSGFRCDQYAS

SEQ ID NO: 32 - protein, 15 aa, Artificial Sequence
  masking moiety
KHGPCHFRLCPQNTS

SEQ ID NO: 33 - protein, 15 aa, Artificial Sequence
  masking moiety
DHGPCHYVSCTTINH

SEQ ID NO: 34 - protein, 15 aa, Artificial Sequence
  masking moiety
KHGPCHFRLCPQNTS

SEQ ID NO: 35 - protein, 15 aa, Artificial Sequence
  masking moiety
MHSYCHYRMCDGHGT

SEQ ID NO: 36 - protein, 15 aa, Artificial Sequence
  masking moiety
WQRECSQKNICQYYI

SEQ ID NO: 37 - protein, 15 aa, Artificial Sequence
  masking moiety
THGPCHFKPNCSYPT

SEQ ID NO: 38 - protein, 15 aa, Artificial Sequence
  masking moiety
NMRWCTPEINCTHHT

SEQ ID NO: 39 - protein, 15 aa, Artificial Sequence
  masking moiety
LHGPCHYDLKCKNNT

SEQ ID NO: 40 - protein, 15 aa, Artificial Sequence
  masking moiety
LHGPCHFLQFCDKTL

SEQ ID NO: 41 - protein, 15 aa, Artificial Sequence
  masking moiety
AHGPCHYNTECNSNK

SEQ ID NO: 42 - protein, 15 aa, Artificial Sequence
  masking moiety
WGTFCSAKNICHLYN

SEQ ID NO: 43 - protein, 15 aa, Artificial Sequence
  masking moiety
VHSACHYNLNCINNN

SEQ ID NO: 44 - protein, 15 aa, Artificial Sequence
  masking moiety
VHGPCHWSVECLSNV

SEQ ID NO: 45 - protein, 15 aa, Artificial Sequence
  masking moiety
SMLCVPDTWMCRLAN

SEQ ID NO: 46 - protein, 15 aa, Artificial Sequence
  masking moiety
HGPCHYNFNSGCAQF

SEQ ID NO: 47 - protein, 15 aa, Artificial Sequence
  masking moiety
LYGCGEFVAERCPRH

SEQ ID NO: 48 - protein, 15 aa, Artificial Sequence
  masking moiety
VLCGGMGLKFGTCRM

SEQ ID NO: 49 - protein, 15 aa, Artificial Sequence
  masking moiety
PCGDHYYFIKYGCNE

SEQ ID NO: 50 - protein, 15 aa, Artificial Sequence
  masking moiety
TDCVCRLWHCCVGVL

SEQ ID NO: 51 - protein, 15 aa, Artificial Sequence
  masking moiety
AYPCPCRQQHCCHDQ

SEQ ID NO: 52 - protein, 15 aa, Artificial Sequence
  masking moiety
SHTACRYNTCCPHHS

SEQ ID NO: 53 - protein, 15 aa, Artificial Sequence
  masking moiety
THGPCHYKECDWMTI

SEQ ID NO: 54 - protein, 15 aa, Artificial Sequence
  masking moiety
DNNVCWKHYCQSQYY

SEQ ID NO: 55 - protein, 15 aa, Artificial Sequence
  masking moiety
RYQSCHSYWCTEGNH

SEQ ID NO: 56 - protein, 15 aa, Artificial Sequence
  masking moiety
LPQNCHSYYACNFNT

SEQ ID NO: 57 - protein, 15 aa, Artificial Sequence
  masking moiety
WQRECSQKNICQYYI

SEQ ID NO: 58 - protein, 15 aa, Artificial Sequence
  masking moiety
LDRRCTVEFGCLSSS

SEQ ID NO: 59 - protein, 15 aa, Artificial Sequence
  masking moiety
TLQTCHSYFQCTQSQ

SEQ ID NO: 60 - protein, 15 aa, Artificial Sequence
  masking moiety
LHGPCHFLQFCDKTL

SEQ ID NO: 61 - protein, 15 aa, Artificial Sequence
  masking moiety
PQTCHSYLVTNCNLN

SEQ ID NO: 62 - protein, 15 aa, Artificial Sequence
  masking moiety
LQMCHSYFQHSCENR

SEQ ID NO: 63 - protein, 15 aa, Artificial Sequence
  masking moiety
VQSCHSYYVAWCHRG

SEQ ID NO: 64 - protein, 15 aa, Artificial Sequence
  masking moiety
QQTCHSYYTNYCSQT

SEQ ID NO: 65 - protein, 15 aa, Artificial Sequence
  masking moiety
QADCFNQSWMSCLSY

SEQ ID NO: 66 - protein, 15 aa, Artificial Sequence
  masking moiety
VWCSSGIPNRACLHH

SEQ ID NO: 67 - protein, 15 aa, Artificial Sequence
  masking moiety
HPCKSTPSARQCKYN

SEQ ID NO: 68 - protein, 15 aa, Artificial Sequence
  masking moiety
MQCSHSYFIQHYCNK

SEQ ID NO: 69 - protein, 15 aa, Artificial Sequence
  masking moiety
VLCGGMGLKFGTCRM

SEQ ID NO: 70 - protein, 15 aa, Artificial Sequence
  masking moiety
VLCGWGELRWGECVT

SEQ ID NO: 71 - protein, 15 aa, Artificial Sequence
  masking moiety
ECHLRGPHPQHHCNK

SEQ ID NO: 72 - protein, 15 aa, Artificial Sequence
  masking moiety
TCLHLTRFNYLSCNK

SEQ ID NO: 73 - protein, 15 aa, Artificial Sequence
  masking moiety
DCELFPQNSYHGCIN

SEQ ID NO: 74 - protein, 15 aa, Artificial Sequence
  masking moiety
TCERITMHNYIHCPN

SEQ ID NO: 75 - protein, 15 aa, Artificial Sequence
  masking moiety
THGPCHFKPNCSYPT

SEQ ID NO: 76 - protein, 15 aa, Artificial Sequence
  masking moiety
LHGPCHYDLKCKNNT

SEQ ID NO: 77 - protein, 15 aa, Artificial Sequence
  masking moiety
SHGPCHFDYQCINNT

SEQ ID NO: 78 - protein, 15 aa, Artificial Sequence
  masking moiety
AHGPCHYNTECNSNK

SEQ ID NO: 79 - protein, 15 aa, Artificial Sequence
  masking moiety
LHGPCHYMNTCHNVK

SEQ ID NO: 80 - protein, 15 aa, Artificial Sequence
  masking moiety
LHGPCHFNNCNTLKL

SEQ ID NO: 81 - protein, 15 aa, Artificial Sequence
  masking moiety
IHGPCHYNECIMSKN

SEQ ID NO: 82 - protein, 15 aa, Artificial Sequence
  masking moiety
WHGPCHYTKCDDHTM

SEQ ID NO: 83 - protein, 15 aa, Artificial Sequence
  masking moiety
THGPCHYKECDWMTI

SEQ ID NO: 84 - protein, 15 aa, Artificial Sequence
  masking moiety
DHGPCHYVSCTTINH

SEQ ID NO: 85 - protein, 15 aa, Artificial Sequence
  masking moiety
LHGLCHYRNCDLPQR

SEQ ID NO: 86 - protein, 15 aa, Artificial Sequence
  masking moiety
KHGPCHFRLCPQNTS

SEQ ID NO: 87 - protein, 15 aa, Artificial Sequence
  masking moiety
WQRECSQKNICQYYI

SEQ ID NO: 88 - protein, 15 aa, Artificial Sequence
  masking moiety
TCLHLTRFNYLSCNK

SEQ ID NO: 89 - protein, 15 aa, Artificial Sequence
  masking moiety
FSCGFRGGYMRLCGG

SEQ ID NO: 90 - protein, 11 aa, Artificial Sequence
  masking moiety
THGPCHFKPNC

SEQ ID NO: 91 - protein, 15 aa, Artificial Sequence
  masking moiety
THGPCHFKPQCSYPT

SEQ ID NO: 92 - protein, 15 aa, Artificial Sequence
  masking moiety
THGPCHFKPNCAYPT

SEQ ID NO: 93 - protein, 15 aa, Artificial Sequence
  masking moiety
THGPCHFRPNCAYPT

SEQ ID NO: 94 - protein, 15 aa, Artificial Sequence
  masking moiety
LHGPCHYDLKCKQNT

SEQ ID NO: 95 - protein, 14 aa, Artificial Sequence
  masking moiety
LHGPCHYDLKCKNN

SEQ ID NO: 96 - protein, 12 aa, Artificial Sequence
  masking moiety
LHGPCHYDLKCK

SEQ ID NO: 97 - protein, 11 aa, Artificial Sequence
  masking moiety
LHGPCHYDLKC

SEQ ID NO: 98 - protein, 11 aa, Artificial Sequence
  masking moiety
LHGPCHYDLRC

SEQ ID NO: 99 - protein, 13 aa, Artificial Sequence
  masking moiety
LHGPCHFNNCNTL

SEQ ID NO: 100 - protein, 13 aa, Artificial Sequence
  masking moiety
TCLHLTRFNYLSC

SEQ ID NO: 101-139 - skipped (39 entries)

SEQ ID NO: 140 - protein, 151 aa, Artificial Sequence
  huCD147 3A11 Lc1-215-3001 VL domain
RYQSCHSYWCTEGNHGGGSSGGSAVGLLAPPGGLSGRSDNHGGSDIQMTQSPSSLSASVGDRVTITCRASQSVRTDVGWYQQKPGKAPKLLIYYSSNRYTGVPSRFSGSGSGTDFTLTISSLQPEDFATYYCQQDYSSPYTFGQGTKLEIK

SEQ ID NO: 141 - protein, 151 aa, Artificial Sequence
  huCD147 3A11 Lc1-216-3001 VL domain
HGPCHYNFNSGCAQFGGGSSGGSAVGLLAPPGGLSGRSDNHGGSDIQMTQSPSSLSASVGDRVTITCRASQSVRTDVGWYQQKPGKAPKLLIYYSSNRYTGVPSRFSGSGSGTDFTLTISSLQPEDFATYYCQQDYSSPYTFGQGTKLEIK

SEQ ID NO: 142 - protein, 151 aa, Artificial Sequence
  huCD147 3A11 Lc1-217-3001 VL domain
QSLFCSGFRCDQYASGGGSSGGSAVGLLAPPGGLSGRSDNHGGSDIQMTQSPSSLSASVGDRVTITCRASQSVRTDVGWYQQKPGKAPKLLIYYSSNRYTGVPSRFSGSGSGTDFTLTISSLQPEDFATYYCQQDYSSPYTFGQGTKLEIK

SEQ ID NO: 143 - protein, 151 aa, Artificial Sequence
  huCD147 3A11 Lc1-221-3001 VL domain
DHGPCHYVSCTTINHGGGSSGGSAVGLLAPPGGLSGRSDNHGGSDIQMTQSPSSLSASVGDRVTITCRASQSVRTDVGWYQQKPGKAPKLLIYYSSNRYTGVPSRFSGSGSGTDFTLTISSLQPEDFATYYCQQDYSSPYTFGQGTKLEIK

SEQ ID NO: 144 - protein, 151 aa, Artificial Sequence
  huCD147 3A11 Lc1-253-3001 VL domain
VHGPCHWSVECLSNVGGGSSGGSAVGLLAPPGGLSGRSDNHGGSDIQMTQSPSSLSASVGDRVTITCRASQSVRTDVGWYQQKPGKAPKLLIYYSSNRYTGVPSRFSGSGSGTDFTLTISSLQPEDFATYYCQQDYSSPYTFGQGTKLEIK

SEQ ID NO: 145 - protein, 151 aa, Artificial Sequence
  huCD147 3A11 Lc1-414-3001 VL domain
THGPCHFKPNCSYPTGGGSSGGSAVGLLAPPGGLSGRSDNHGGSDIQMTQSPSSLSASVGDRVTITCRASQSVRTDVGWYQQKPGKAPKLLIYYSSNRYTGVPSRFSGSGSGTDFTLTISSLQPEDFATYYCQQDYSSPYTFGQGTKLEIK

SEQ ID NO: 146 - protein, 151 aa, Artificial Sequence
  huCD147 3A11 Lc1-415-3001 VL domain
LHGPCHFNNCNTLKLGGGSSGGSAVGLLAPPGGLSGRSDNHGGSDIQMTQSPSSLSASVGDRVTITCRASQSVRTDVGWYQQKPGKAPKLLIYYSSNRYTGVPSRFSGSGSGTDFTLTISSLQPEDFATYYCQQDYSSPYTFGQGTKLEIK

SEQ ID NO: 147 - protein, 151 aa, Artificial Sequence
  huCD147 3A11 Lc1-416-3001 VL domain
WQRECSQKNICQYYIGGGSSGGSAVGLLAPPGGLSGRSDNHGGSDIQMTQSPSSLSASVGDRVTITCRASQSVRTDVGWYQQKPGKAPKLLIYYSSNRYTGVPSRFSGSGSGTDFTLTISSLQPEDFATYYCQQDYSSPYTFGQGTKLEIK

SEQ ID NO: 148 - protein, 151 aa, Artificial Sequence
  huCD147 3A11 Lc1-419-3001 VL domain
LHGPCHYDLKCKNNTGGGSSGGSAVGLLAPPGGLSGRSDNHGGSDIQMTQSPSSLSASVGDRVTITCRASQSVRTDVGWYQQKPGKAPKLLIYYSSNRYTGVPSRFSGSGSGTDFTLTISSLQPEDFATYYCQQDYSSPYTFGQGTKLEIK

SEQ ID NO: 149 - protein, 151 aa, Artificial Sequence
  huCD147 3A11 Lc1-422-3001 VL domain
LHGPCHYMNTCHNVKGGGSSGGSAVGLLAPPGGLSGRSDNHGGSDIQMTQSPSSLSASVGDRVTITCRASQSVRTDVGWYQQKPGKAPKLLIYYSSNRYTGVPSRFSGSGSGTDFTLTISSLQPEDFATYYCQQDYSSPYTFGQGTKLEIK

SEQ ID NO: 150 - protein, 151 aa, Artificial Sequence
  huCD147 3A11 Lc1-423-3001 VL domain
FSCGFRGGYMRLCGGGGGSSGGSAVGLLAPPGGLSGRSDNHGGSDIQMTQSPSSLSASVGDRVTITCRASQSVRTDVGWYQQKPGKAPKLLIYYSSNRYTGVPSRFSGSGSGTDFTLTISSLQPEDFATYYCQQDYSSPYTFGQGTKLEIK

SEQ ID NO: 151 - protein, 151 aa, Artificial Sequence
  huCD147 3A11 Lc1-427-3001 VL domain
KHGPCHFRLCPQNTSGGGSSGGSAVGLLAPPGGLSGRSDNHGGSDIQMTQSPSSLSASVGDRVTITCRASQSVRTDVGWYQQKPGKAPKLLIYYSSNRYTGVPSRFSGSGSGTDFTLTISSLQPEDFATYYCQQDYSSPYTFGQGTKLEIK

SEQ ID NO: 152 - protein, 151 aa, Artificial Sequence
  huCD147 3A11 Lc1-428-3001 VL domain
WHGPCHYTKCDDHTMGGGSSGGSAVGLLAPPGGLSGRSDNHGGSDIQMTQSPSSLSASVGDRVTITCRASQSVRTDVGWYQQKPGKAPKLLIYYSSNRYTGVPSRFSGSGSGTDFTLTISSLQPEDFATYYCQQDYSSPYTFGQGTKLEIK

SEQ ID NO: 153 - protein, 151 aa, Artificial Sequence
  huCD147 3A11 Lc1-440-3001 VL domain
TCLHLTRFNYLSCNKGGGSSGGSAVGLLAPPGGLSGRSDNHGGSDIQMTQSPSSLSASVGDRVTITCRASQSVRTDVGWYQQKPGKAPKLLIYYSSNRYTGVPSRFSGSGSGTDFTLTISSLQPEDFATYYCQQDYSSPYTFGQGTKLEIK

SEQ ID NO: 154 - protein, 151 aa, Artificial Sequence
  huCD147 3A11 Lc1-443-3001 VL domain
AHGPCHYNTECNSNKGGGSSGGSAVGLLAPPGGLSGRSDNHGGSDIQMTQSPSSLSASVGDRVTITCRASQSVRTDVGWYQQKPGKAPKLLIYYSSNRYTGVPSRFSGSGSGTDFTLTISSLQPEDFATYYCQQDYSSPYTFGQGTKLEIK

SEQ ID NO: 155 - protein, 151 aa, Artificial Sequence
  huCD147 3A11 Lc1-444-3001 VL domain
THGPCHYKECDWMTIGGGSSGGSAVGLLAPPGGLSGRSDNHGGSDIQMTQSPSSLSASVGDRVTITCRASQSVRTDVGWYQQKPGKAPKLLIYYSSNRYTGVPSRFSGSGSGTDFTLTISSLQPEDFATYYCQQDYSSPYTFGQGTKLEIK

SEQ ID NO: 156 - protein, 151 aa, Artificial Sequence
  huCD147 3A11 Lc1-445-3001 VL domain
SHGPCHFDYQCINNTGGGSSGGSAVGLLAPPGGLSGRSDNHGGSDIQMTQSPSSLSASVGDRVTITCRASQSVRTDVGWYQQKPGKAPKLLIYYSSNRYTGVPSRFSGSGSGTDFTLTISSLQPEDFATYYCQQDYSSPYTFGQGTKLEIK

SEQ ID NO: 157 - protein, 147 aa, Artificial Sequence
  huCD147 3A11 Lc1-414.1-3001 VL domain
THGPCHFKPNCGGGSSGGSAVGLLAPPGGLSGRSDNHGGSDIQMTQSPSSLSASVGDRVTITCRASQSVRTDVGWYQQKPGKAPKLLIYYSSNRYTGVPSRFSGSGSGTDFTLTISSLQPEDFATYYCQQDYSSPYTFGQGTKLEIK

SEQ ID NO: 158 - protein, 151 aa, Artificial Sequence
  huCD147 3A11 Lc1-414.2-3001 VL domain
THGPCHFKPQCSYPTGGGSSGGSAVGLLAPPGGLSGRSDNHGGSDIQMTQSPSSLSASVGDRVTITCRASQSVRTDVGWYQQKPGKAPKLLIYYSSNRYTGVPSRFSGSGSGTDFTLTISSLQPEDFATYYCQQDYSSPYTFGQGTKLEIK

SEQ ID NO: 159 - protein, 151 aa, Artificial Sequence
  huCD147 3A11 Lc1-414.3-3001 VL domain
THGPCHFKPNCAYPTGGGSSGGSAVGLLAPPGGLSGRSDNHGGSDIQMTQSPSSLSASVGDRVTITCRASQSVRTDVGWYQQKPGKAPKLLIYYSSNRYTGVPSRFSGSGSGTDFTLTISSLQPEDFATYYCQQDYSSPYTFGQGTKLEIK

SEQ ID NO: 160 - protein, 151 aa, Artificial Sequence
  huCD147 3A11 Lc1-419.1-3001 VL domain
LHGPCHYDLKCKQNTGGGSSGGSAVGLLAPPGGLSGRSDNHGGSDIQMTQSPSSLSASVGDRVTITCRASQSVRTDVGWYQQKPGKAPKLLIYYSSNRYTGVPSRFSGSGSGTDFTLTISSLQPEDFATYYCQQDYSSPYTFGQGTKLEIK

SEQ ID NO: 161 - protein, 150 aa, Artificial Sequence
  huCD147 3A11 Lc1-419.2-3001 VL domain
LHGPCHYDLKCKNNGGGSSGGSAVGLLAPPGGLSGRSDNHGGSDIQMTQSPSSLSASVGDRVTITCRASQSVRTDVGWYQQKPGKAPKLLIYYSSNRYTGVPSRFSGSGSGTDFTLTISSLQPEDFATYYCQQDYSSPYTFGQGTKLEIK

SEQ ID NO: 162 - protein, 148 aa, Artificial Sequence
  huCD147 3A11 Lc1-419.3-3001 VL domain
LHGPCHYDLKCKGGGSSGGSAVGLLAPPGGLSGRSDNHGGSDIQMTQSPSSLSASVGDRVTITCRASQSVRTDVGWYQQKPGKAPKLLIYYSSNRYTGVPSRFSGSGSGTDFTLTISSLQPEDFATYYCQQDYSSPYTFGQGTKLEIK

SEQ ID NO: 163 - protein, 147 aa, Artificial Sequence
  huCD147 3A11 Lc1-414.3-2012 VL domain
THGPCHFKPNCAYPTGGGSSGGSISSGLLSGRSANPGGGSDIQMTQSPSSLSASVGDRVTITCRASQSVRTDVGWYQQKPGKAPKLLIYYSSNRYTGVPSRFSGSGSGTDFTLTISSLQPEDFATYYCQQDYSSPYTFGQGTKLEIK

SEQ ID NO: 164 - protein, 147 aa, Artificial Sequence
  huCD147 3A11 Lc1-414.4-2012 VL domain
THGPCHFRPNCAYPTGGGSSGGSISSGLLSGRSANPGGGSDIQMTQSPSSLSASVGDRVTITCRASQSVRTDVGWYQQKPGKAPKLLIYYSSNRYTGVPSRFSGSGSGTDFTLTISSLQPEDFATYYCQQDYSSPYTFGQGTKLEIK

SEQ ID NO: 165 - protein, 147 aa, Artificial Sequence
  huCD147 3A11 Lc1-415-2012 VL domain
LHGPCHFNNCNTLKLGGGSSGGSISSGLLSGRSANPGGGSDIQMTQSPSSLSASVGDRVTITCRASQSVRTDVGWYQQKPGKAPKLLIYYSSNRYTGVPSRFSGSGSGTDFTLTISSLQPEDFATYYCQQDYSSPYTFGQGTKLEIK

SEQ ID NO: 166 - protein, 145 aa, Artificial Sequence
  huCD147 3A11 Lc1-415.1-2012 VL domain
LHGPCHFNNCNTLGGGSSGGSISSGLLSGRSANPGGGSDIQMTQSPSSLSASVGDRVTITCRASQSVRTDVGWYQQKPGKAPKLLIYYSSNRYTGVPSRFSGSGSGTDFTLTISSLQPEDFATYYCQQDYSSPYTFGQGTKLEIK

SEQ ID NO: 167 - protein, 144 aa, Artificial Sequence
  huCD147 3A11 Lc1-419.3-2012 VL domain
LHGPCHYDLKCKGGGSSGGSISSGLLSGRSANPGGGSDIQMTQSPSSLSASVGDRVTITCRASQSVRTDVGWYQQKPGKAPKLLIYYSSNRYTGVPSRFSGSGSGTDFTLTISSLQPEDFATYYCQQDYSSPYTFGQGTKLEIK

SEQ ID NO: 168 - protein, 143 aa, Artificial Sequence
  huCD147 3A11 Lc1-419.4-2012 VL domain
LHGPCHYDLKCGGGSSGGSISSGLLSGRSANPGGGSDIQMTQSPSSLSASVGDRVTITCRASQSVRTDVGWYQQKPGKAPKLLIYYSSNRYTGVPSRFSGSGSGTDFTLTISSLQPEDFATYYCQQDYSSPYTFGQGTKLEIK

SEQ ID NO: 169 - protein, 143 aa, Artificial Sequence
  huCD147 3A11 Lc1-419.5-2012 VL domain
LHGPCHYDLRCGGGSSGGSISSGLLSGRSANPGGGSDIQMTQSPSSLSASVGDRVTITCRASQSVRTDVGWYQQKPGKAPKLLIYYSSNRYTGVPSRFSGSGSGTDFTLTISSLQPEDFATYYCQQDYSSPYTFGQGTKLEIK

SEQ ID NO: 170 - protein, 147 aa, Artificial Sequence
  huCD147 3A11 Lc1-440-2012 VL domain
TCLHLTRFNYLSCNKGGGSSGGSISSGLLSGRSANPGGGSDIQMTQSPSSLSASVGDRVTITCRASQSVRTDVGWYQQKPGKAPKLLIYYSSNRYTGVPSRFSGSGSGTDFTLTISSLQPEDFATYYCQQDYSSPYTFGQGTKLEIK

SEQ ID NO: 171 - protein, 145 aa, Artificial Sequence
  huCD147 3A11 Lc1-440.1-2012 VL domain
TCLHLTRFNYLSCGGGSSGGSISSGLLSGRSANPGGGSDIQMTQSPSSLSASVGDRVTITCRASQSVRTDVGWYQQKPGKAPKLLIYYSSNRYTGVPSRFSGSGSGTDFTLTISSLQPEDFATYYCQQDYSSPYTFGQGTKLEIK

SEQ ID NO: 172 - protein, 145 aa, Artificial Sequence
  huCD147 3A11 Lc1-440.1-2001 VL domain
TCLHLTRFNYLSCGGGSSGGSISSGLLSGRSDNHGGGSDIQMTQSPSSLSASVGDRVTITCRASQSVRTDVGWYQQKPGKAPKLLIYYSSNRYTGVPSRFSGSGSGTDFTLTISSLQPEDFATYYCQQDYSSPYTFGQGTKLEIK

SEQ ID NO: 173 - protein, 149 aa, Artificial Sequence
  huCD147 3A11 Lc1-440.1-3001 VL domain
TCLHLTRFNYLSCGGGSSGGSAVGLLAPPGGLSGRSDNHGGSDIQMTQSPSSLSASVGDRVTITCRASQSVRTDVGWYQQKPGKAPKLLIYYSSNRYTGVPSRFSGSGSGTDFTLTISSLQPEDFATYYCQQDYSSPYTFGQGTKLEIK

SEQ ID NO: 174 - protein, 145 aa, Artificial Sequence
  huCD147 3A11 Lc1-440.1-2007 VL domain
TCLHLTRFNYLSCGGGSSGGSISSGLLSGRSDIHGGGSDIQMTQSPSSLSASVGDRVTITCRASQSVRTDVGWYQQKPGKAPKLLIYYSSNRYTGVPSRFSGSGSGTDFTLTISSLQPEDFATYYCQQDYSSPYTFGQGTKLEIK

SEQ ID NO: 175 - protein, 149 aa, Artificial Sequence
  huCD147 3A11 Lc1-440.1-3007 VL domain
TCLHLTRFNYLSCGGGSSGGSAVGLLAPPGGLSGRSDIHGGSDIQMTQSPSSLSASVGDRVTITCRASQSVRTDVGWYQQKPGKAPKLLIYYSSNRYTGVPSRFSGSGSGTDFTLTISSLQPEDFATYYCQQDYSSPYTFGQGTKLEIK

SEQ ID NO: 176 - protein, 145 aa, Artificial Sequence
  huCD147 3A11 Lc1-440.1-2008 VL domain
TCLHLTRFNYLSCGGGSSGGSISSGLLSGRSDQHGGGSDIQMTQSPSSLSASVGDRVTITCRASQSVRTDVGWYQQKPGKAPKLLIYYSSNRYTGVPSRFSGSGSGTDFTLTISSLQPEDFATYYCQQDYSSPYTFGQGTKLEIK

SEQ ID NO: 177 - protein, 149 aa, Artificial Sequence
  huCD147 3A11 Lc1-440.1-3008 VL domain
TCLHLTRFNYLSCGGGSSGGSAVGLLAPPGGLSGRSDQHGGSDIQMTQSPSSLSASVGDRVTITCRASQSVRTDVGWYQQKPGKAPKLLIYYSSNRYTGVPSRFSGSGSGTDFTLTISSLQPEDFATYYCQQDYSSPYTFGQGTKLEIK

SEQ ID NO: 178 - protein, 145 aa, Artificial Sequence
  huCD147 3A11 Lc1-440.1-2011 VL domain
TCLHLTRFNYLSCGGGSSGGSISSGLLSGRSDNPGGGSDIQMTQSPSSLSASVGDRVTITCRASQSVRTDVGWYQQKPGKAPKLLIYYSSNRYTGVPSRFSGSGSGTDFTLTISSLQPEDFATYYCQQDYSSPYTFGQGTKLEIK

SEQ ID NO: 179 - protein, 149 aa, Artificial Sequence
  huCD147 3A11 Lc1-440.1-3011 VL domain
TCLHLTRFNYLSCGGGSSGGSAVGLLAPPGGLSGRSDNPGGSDIQMTQSPSSLSASVGDRVTITCRASQSVRTDVGWYQQKPGKAPKLLIYYSSNRYTGVPSRFSGSGSGTDFTLTISSLQPEDFATYYCQQDYSSPYTFGQGTKLEIK

SEQ ID NO: 180 - protein, 149 aa, Artificial Sequence
  huCD147 3A11 Lc1-440.1-3012 VL domain
TCLHLTRFNYLSCGGGSSGGSAVGLLAPPGGLSGRSANPGGSDIQMTQSPSSLSASVGDRVTITCRASQSVRTDVGWYQQKPGKAPKLLIYYSSNRYTGVPSRFSGSGSGTDFTLTISSLQPEDFATYYCQQDYSSPYTFGQGTKLEIK

SEQ ID NO: 181 - protein, 145 aa, Artificial Sequence
  huCD147 3A11 Lc1-440.1-2013 VL domain
TCLHLTRFNYLSCGGGSSGGSISSGLLSGRSANIGGGSDIQMTQSPSSLSASVGDRVTITCRASQSVRTDVGWYQQKPGKAPKLLIYYSSNRYTGVPSRFSGSGSGTDFTLTISSLQPEDFATYYCQQDYSSPYTFGQGTKLEIK

SEQ ID NO: 182 - protein, 149 aa, Artificial Sequence
  huCD147 3A11 Lc1-440.1-3013 VL domain
TCLHLTRFNYLSCGGGSSGGSAVGLLAPPGGLSGRSANIGGSDIQMTQSPSSLSASVGDRVTITCRASQSVRTDVGWYQQKPGKAPKLLIYYSSNRYTGVPSRFSGSGSGTDFTLTISSLQPEDFATYYCQQDYSSPYTFGQGTKLEIK

SEQ ID NO: 183-184 - skipped (2 entries)

SEQ ID NO: 185 - protein, 158 aa, Artificial Sequence
  Spacer-huCD147 3A11 Lc1-215-3001 VL domain
QGQSGQGRYQSCHSYWCTEGNHGGGSSGGSAVGLLAPPGGLSGRSDNHGGSDIQMTQSPSSLSASVGDRVTITCRASQSVRTDVGWYQQKPGKAPKLLIYYSSNRYTGVPSRFSGSGSGTDFTLTISSLQPEDFATYYCQQDYSSPYTFGQGTKLEIK

SEQ ID NO: 186 - protein, 158 aa, Artificial Sequence
  Spacer-huCD147 3A11 Lc1-216-3001 VL domain
QGQSGQGHGPCHYNFNSGCAQFGGGSSGGSAVGLLAPPGGLSGRSDNHGGSDIQMTQSPSSLSASVGDRVTITCRASQSVRTDVGWYQQKPGKAPKLLIYYSSNRYTGVPSRFSGSGSGTDFTLTISSLQPEDFATYYCQQDYSSPYTFGQGTKLEIK

SEQ ID NO: 187 - protein, 158 aa, Artificial Sequence
  Spacer-huCD147 3A11 Lc1-217-3001 VL domain
QGQSGQGQSLFCSGFRCDQYASGGGSSGGSAVGLLAPPGGLSGRSDNHGGSDIQMTQSPSSLSASVGDRVTITCRASQSVRTDVGWYQQKPGKAPKLLIYYSSNRYTGVPSRFSGSGSGTDFTLTISSLQPEDFATYYCQQDYSSPYTFGQGTKLEIK

SEQ ID NO: 188 - protein, 158 aa, Artificial Sequence
  Spacer-huCD147 3A11 Lc1-221-3001 VL domain
QGQSGQGDHGPCHYVSCTTINHGGGSSGGSAVGLLAPPGGLSGRSDNHGGSDIQMTQSPSSLSASVGDRVTITCRASQSVRTDVGWYQQKPGKAPKLLIYYSSNRYTGVPSRFSGSGSGTDFTLTISSLQPEDFATYYCQQDYSSPYTFGQGTKLEIK

SEQ ID NO: 189 - protein, 158 aa, Artificial Sequence
  Spacer-huCD147 3A11 Lc1-253-3001 VL domain
QGQSGQGVHGPCHWSVECLSNVGGGSSGGSAVGLLAPPGGLSGRSDNHGGSDIQMTQSPSSLSASVGDRVTITCRASQSVRTDVGWYQQKPGKAPKLLIYYSSNRYTGVPSRFSGSGSGTDFTLTISSLQPEDFATYYCQQDYSSPYTFGQGTKLEIK

SEQ ID NO: 190 - protein, 158 aa, Artificial Sequence
  Spacer-huCD147 3A11 Lc1-414-3001 VL domain
QGQSGQGTHGPCHFKPNCSYPTGGGSSGGSAVGLLAPPGGLSGRSDNHGGSDIQMTQSPSSLSASVGDRVTITCRASQSVRTDVGWYQQKPGKAPKLLIYYSSNRYTGVPSRFSGSGSGTDFTLTISSLQPEDFATYYCQQDYSSPYTFGQGTKLEIK

SEQ ID NO: 191 - protein, 158 aa, Artificial Sequence
  Spacer-huCD147 3A11 Lc1-415-3001 VL domain
QGQSGQGLHGPCHFNNCNTLKLGGGSSGGSAVGLLAPPGGLSGRSDNHGGSDIQMTQSPSSLSASVGDRVTITCRASQSVRTDVGWYQQKPGKAPKLLIYYSSNRYTGVPSRFSGSGSGTDFTLTISSLQPEDFATYYCQQDYSSPYTFGQGTKLEIK

SEQ ID NO: 192 - protein, 158 aa, Artificial Sequence
  Spacer-huCD147 3A11 Lc1-416-3001 VL domain
QGQSGQGWQRECSQKNICQYYIGGGSSGGSAVGLLAPPGGLSGRSDNHGGSDIQMTQSPSSLSASVGDRVTITCRASQSVRTDVGWYQQKPGKAPKLLIYYSSNRYTGVPSRFSGSGSGTDFTLTISSLQPEDFATYYCQQDYSSPYTFGQGTKLEIK

SEQ ID NO: 193 - protein, 158 aa, Artificial Sequence
  Spacer-huCD147 3A11 Lc1-419-3001 VL domain
QGQSGQGLHGPCHYDLKCKNNTGGGSSGGSAVGLLAPPGGLSGRSDNHGGSDIQMTQSPSSLSASVGDRVTITCRASQSVRTDVGWYQQKPGKAPKLLIYYSSNRYTGVPSRFSGSGSGTDFTLTISSLQPEDFATYYCQQDYSSPYTFGQGTKLEIK

SEQ ID NO: 194 - protein, 158 aa, Artificial Sequence
  Spacer-huCD147 3A11 Lc1-422-3001 VL domain
QGQSGQGLHGPCHYMNTCHNVKGGGSSGGSAVGLLAPPGGLSGRSDNHGGSDIQMTQSPSSLSASVGDRVTITCRASQSVRTDVGWYQQKPGKAPKLLIYYSSNRYTGVPSRFSGSGSGTDFTLTISSLQPEDFATYYCQQDYSSPYTFGQGTKLEIK

SEQ ID NO: 195 - protein, 158 aa, Artificial Sequence
  Spacer-huCD147 3A11 Lc1-423-3001 VL domain
QGQSGQGFSCGFRGGYMRLCGGGGGSSGGSAVGLLAPPGGLSGRSDNHGGSDIQMTQSPSSLSASVGDRVTITCRASQSVRTDVGWYQQKPGKAPKLLIYYSSNRYTGVPSRFSGSGSGTDFTLTISSLQPEDFATYYCQQDYSSPYTFGQGTKLEIK

SEQ ID NO: 196 - protein, 158 aa, Artificial Sequence
  Spacer-huCD147 3A11 Lc1-427-3001 VL domain
QGQSGQGKHGPCHFRLCPQNTSGGGSSGGSAVGLLAPPGGLSGRSDNHGGSDIQMTQSPSSLSASVGDRVTITCRASQSVRTDVGWYQQKPGKAPKLLIYYSSNRYTGVPSRFSGSGSGTDFTLTISSLQPEDFATYYCQQDYSSPYTFGQGTKLEIK

SEQ ID NO: 197 - protein, 158 aa, Artificial Sequence
  Spacer-huCD147 3A11 Lc1-428-3001 VL domain
QGQSGQGWHGPCHYTKCDDHTMGGGSSGGSAVGLLAPPGGLSGRSDNHGGSDIQMTQSPSSLSASVGDRVTITCRASQSVRTDVGWYQQKPGKAPKLLIYYSSNRYTGVPSRFSGSGSGTDFTLTISSLQPEDFATYYCQQDYSSPYTFGQGTKLEIK

SEQ ID NO: 198 - protein, 158 aa, Artificial Sequence
  Spacer-huCD147 3A11 Lc1-440-3001 VL domain
QGQSGQGTCLHLTRFNYLSCNKGGGSSGGSAVGLLAPPGGLSGRSDNHGGSDIQMTQSPSSLSASVGDRVTITCRASQSVRTDVGWYQQKPGKAPKLLIYYSSNRYTGVPSRFSGSGSGTDFTLTISSLQPEDFATYYCQQDYSSPYTFGQGTKLEIK

SEQ ID NO: 199 - protein, 158 aa, Artificial Sequence
  Spacer-huCD147 3A11 Lc1-443-3001 VL domain
QGQSGQGAHGPCHYNTECNSNKGGGSSGGSAVGLLAPPGGLSGRSDNHGGSDIQMTQSPSSLSASVGDRVTITCRASQSVRTDVGWYQQKPGKAPKLLIYYSSNRYTGVPSRFSGSGSGTDFTLTISSLQPEDFATYYCQQDYSSPYTFGQGTKLEIK

SEQ ID NO: 200 - protein, 158 aa, Artificial Sequence
  Spacer-huCD147 3A11 Lc1-444-3001 VL domain
QGQSGQGTHGPCHYKECDWMTIGGGSSGGSAVGLLAPPGGLSGRSDNHGGSDIQMTQSPSSLSASVGDRVTITCRASQSVRTDVGWYQQKPGKAPKLLIYYSSNRYTGVPSRFSGSGSGTDFTLTISSLQPEDFATYYCQQDYSSPYTFGQGTKLEIK

SEQ ID NO: 201 - protein, 158 aa, Artificial Sequence
  Spacer-huCD147 3A11 Lc1-445-3001 VL domain
QGQSGQGSHGPCHFDYQCINNTGGGSSGGSAVGLLAPPGGLSGRSDNHGGSDIQMTQSPSSLSASVGDRVTITCRASQSVRTDVGWYQQKPGKAPKLLIYYSSNRYTGVPSRFSGSGSGTDFTLTISSLQPEDFATYYCQQDYSSPYTFGQGTKLEIK

SEQ ID NO: 202 - protein, 154 aa, Artificial Sequence
  Spacer-huCD147 3A11 Lc1-414.1-3001 VL domain
QGQSGQGTHGPCHFKPNCGGGSSGGSAVGLLAPPGGLSGRSDNHGGSDIQMTQSPSSLSASVGDRVTITCRASQSVRTDVGWYQQKPGKAPKLLIYYSSNRYTGVPSRFSGSGSGTDFTLTISSLQPEDFATYYCQQDYSSPYTFGQGTKLEIK

SEQ ID NO: 203 - protein, 158 aa, Artificial Sequence
  Spacer-huCD147 3A11 Lc1-414.2-3001 VL domain
QGQSGQGTHGPCHFKPQCSYPTGGGSSGGSAVGLLAPPGGLSGRSDNHGGSDIQMTQSPSSLSASVGDRVTITCRASQSVRTDVGWYQQKPGKAPKLLIYYSSNRYTGVPSRFSGSGSGTDFTLTISSLQPEDFATYYCQQDYSSPYTFGQGTKLEIK

SEQ ID NO: 204 - protein, 158 aa, Artificial Sequence
  Spacer-huCD147 3A11 Lc1-414.3-3001 VL domain
QGQSGQGTHGPCHFKPNCAYPTGGGSSGGSAVGLLAPPGGLSGRSDNHGGSDIQMTQSPSSLSASVGDRVTITCRASQSVRTDVGWYQQKPGKAPKLLIYYSSNRYTGVPSRFSGSGSGTDFTLTISSLQPEDFATYYCQQDYSSPYTFGQGTKLEIK

SEQ ID NO: 205 - protein, 158 aa, Artificial Sequence
  Spacer-huCD147 3A11 Lc1-419.1-3001 VL domain
QGQSGQGLHGPCHYDLKCKQNTGGGSSGGSAVGLLAPPGGLSGRSDNHGGSDIQMTQSPSSLSASVGDRVTITCRASQSVRTDVGWYQQKPGKAPKLLIYYSSNRYTGVPSRFSGSGSGTDFTLTISSLQPEDFATYYCQQDYSSPYTFGQGTKLEIK

SEQ ID NO: 206 - protein, 157 aa, Artificial Sequence
  Spacer-huCD147 3A11 Lc1-419.2-3001 VL domain
QGQSGQGLHGPCHYDLKCKNNGGGSSGGSAVGLLAPPGGLSGRSDNHGGSDIQMTQSPSSLSASVGDRVTITCRASQSVRTDVGWYQQKPGKAPKLLIYYSSNRYTGVPSRFSGSGSGTDFTLTISSLQPEDFATYYCQQDYSSPYTFGQGTKLEIK

SEQ ID NO: 207 - protein, 155 aa, Artificial Sequence
  Spacer-huCD147 3A11 Lc1-419.3-3001 VL domain
QGQSGQGLHGPCHYDLKCKGGGSSGGSAVGLLAPPGGLSGRSDNHGGSDIQMTQSPSSLSASVGDRVTITCRASQSVRTDVGWYQQKPGKAPKLLIYYSSNRYTGVPSRFSGSGSGTDFTLTISSLQPEDFATYYCQQDYSSPYTFGQGTKLEIK

SEQ ID NO: 208 - protein, 154 aa, Artificial Sequence
  Spacer-huCD147 3A11 Lc1-414.3-2012 VL domain
QGQSGQGTHGPCHFKPNCAYPTGGGSSGGSISSGLLSGRSANPGGGSDIQMTQSPSSLSASVGDRVTITCRASQSVRTDVGWYQQKPGKAPKLLIYYSSNRYTGVPSRFSGSGSGTDFTLTISSLQPEDFATYYCQQDYSSPYTFGQGTKLEIK

SEQ ID NO: 209 - protein, 154 aa, Artificial Sequence
  Spacer-huCD147 3A11 Lc1-414.4-2012 VL domain
QGQSGQGTHGPCHFRPNCAYPTGGGSSGGSISSGLLSGRSANPGGGSDIQMTQSPSSLSASVGDRVTITCRASQSVRTDVGWYQQKPGKAPKLLIYYSSNRYTGVPSRFSGSGSGTDFTLTISSLQPEDFATYYCQQDYSSPYTFGQGTKLEIK

SEQ ID NO: 210 - protein, 154 aa, Artificial Sequence
  Spacer-huCD147 3A11 Lc1-415-2012 VL domain
QGQSGQGLHGPCHFNNCNTLKLGGGSSGGSISSGLLSGRSANPGGGSDIQMTQSPSSLSASVGDRVTITCRASQSVRTDVGWYQQKPGKAPKLLIYYSSNRYTGVPSRFSGSGSGTDFTLTISSLQPEDFATYYCQQDYSSPYTFGQGTKLEIK

SEQ ID NO: 211 - protein, 152 aa, Artificial Sequence
  Spacer-huCD147 3A11 Lc1-415.1-2012 VL domain
QGQSGQGLHGPCHFNNCNTLGGGSSGGSISSGLLSGRSANPGGGSDIQMTQSPSSLSASVGDRVTITCRASQSVRTDVGWYQQKPGKAPKLLIYYSSNRYTGVPSRFSGSGSGTDFTLTISSLQPEDFATYYCQQDYSSPYTFGQGTKLEIK

SEQ ID NO: 212 - protein, 151 aa, Artificial Sequence
  Spacer-huCD147 3A11 Lc1-419.3-2012 VL domain
QGQSGQGLHGPCHYDLKCKGGGSSGGSISSGLLSGRSANPGGGSDIQMTQSPSSLSASVGDRVTITCRASQSVRTDVGWYQQKPGKAPKLLIYYSSNRYTGVPSRFSGSGSGTDFTLTISSLQPEDFATYYCQQDYSSPYTFGQGTKLEIK

SEQ ID NO: 213 - protein, 150 aa, Artificial Sequence
  Spacer-huCD147 3A11 Lc1-419.4-2012 VL domain
QGQSGQGLHGPCHYDLKCGGGSSGGSISSGLLSGRSANPGGGSDIQMTQSPSSLSASVGDRVTITCRASQSVRTDVGWYQQKPGKAPKLLIYYSSNRYTGVPSRFSGSGSGTDFTLTISSLQPEDFATYYCQQDYSSPYTFGQGTKLEIK

SEQ ID NO: 214 - protein, 150 aa, Artificial Sequence
  Spacer-huCD147 3A11 Lc1-419.5-2012 VL domain
QGQSGQGLHGPCHYDLRCGGGSSGGSISSGLLSGRSANPGGGSDIQMTQSPSSLSASVGDRVTITCRASQSVRTDVGWYQQKPGKAPKLLIYYSSNRYTGVPSRFSGSGSGTDFTLTISSLQPEDFATYYCQQDYSSPYTFGQGTKLEIK

SEQ ID NO: 215 - protein, 154 aa, Artificial Sequence
  Spacer-huCD147 3A11 Lc1-440-2012 VL domain
QGQSGQGTCLHLTRFNYLSCNKGGGSSGGSISSGLLSGRSANPGGGSDIQMTQSPSSLSASVGDRVTITCRASQSVRTDVGWYQQKPGKAPKLLIYYSSNRYTGVPSRFSGSGSGTDFTLTISSLQPEDFATYYCQQDYSSPYTFGQGTKLEIK

SEQ ID NO: 216 - protein, 152 aa, Artificial Sequence
  Spacer-huCD147 3A11 Lc1-440.1-2012 VL domain
QGQSGQGTCLHLTRFNYLSCGGGSSGGSISSGLLSGRSANPGGGSDIQMTQSPSSLSASVGDRVTITCRASQSVRTDVGWYQQKPGKAPKLLIYYSSNRYTGVPSRFSGSGSGTDFTLTISSLQPEDFATYYCQQDYSSPYTFGQGTKLEIK

SEQ ID NO: 217 - protein, 152 aa, Artificial Sequence
  Spacer-huCD147 3A11 Lc1-440.1-2001 VL domain
QGQSGQGTCLHLTRFNYLSCGGGSSGGSISSGLLSGRSDNHGGGSDIQMTQSPSSLSASVGDRVTITCRASQSVRTDVGWYQQKPGKAPKLLIYYSSNRYTGVPSRFSGSGSGTDFTLTISSLQPEDFATYYCQQDYSSPYTFGQGTKLEIK

SEQ ID NO: 218 - protein, 156 aa, Artificial Sequence
  Spacer-huCD147 3A11 Lc1-440.1-3001 VL domain
QGQSGQGTCLHLTRFNYLSCGGGSSGGSAVGLLAPPGGLSGRSDNHGGSDIQMTQSPSSLSASVGDRVTITCRASQSVRTDVGWYQQKPGKAPKLLIYYSSNRYTGVPSRFSGSGSGTDFTLTISSLQPEDFATYYCQQDYSSPYTFGQGTKLEIK

SEQ ID NO: 219 - protein, 152 aa, Artificial Sequence
  Spacer-huCD147 3A11 Lc1-440.1-2007 VL domain
QGQSGQGTCLHLTRFNYLSCGGGSSGGSISSGLLSGRSDIHGGGSDIQMTQSPSSLSASVGDRVTITCRASQSVRTDVGWYQQKPGKAPKLLIYYSSNRYTGVPSRFSGSGSGTDFTLTISSLQPEDFATYYCQQDYSSPYTFGQGTKLEIK

SEQ ID NO: 220 - protein, 156 aa, Artificial Sequence
  Spacer-huCD147 3A11 Lc1-440.1-3007 VL domain
QGQSGQGTCLHLTRFNYLSCGGGSSGGSAVGLLAPPGGLSGRSDIHGGSDIQMTQSPSSLSASVGDRVTITCRASQSVRTDVGWYQQKPGKAPKLLIYYSSNRYTGVPSRFSGSGSGTDFTLTISSLQPEDFATYYCQQDYSSPYTFGQGTKLEIK

SEQ ID NO: 221 - protein, 152 aa, Artificial Sequence
  Spacer-huCD147 3A11 Lc1-440.1-2008 VL domain
QGQSGQGTCLHLTRFNYLSCGGGSSGGSISSGLLSGRSDQHGGGSDIQMTQSPSSLSASVGDRVTITCRASQSVRTDVGWYQQKPGKAPKLLIYYSSNRYTGVPSRFSGSGSGTDFTLTISSLQPEDFATYYCQQDYSSPYTFGQGTKLEIK

SEQ ID NO: 222 - protein, 156 aa, Artificial Sequence
  Spacer-huCD147 3A11 Lc1-440.1-3008 VL domain
QGQSGQGTCLHLTRFNYLSCGGGSSGGSAVGLLAPPGGLSGRSDQHGGSDIQMTQSPSSLSASVGDRVTITCRASQSVRTDVGWYQQKPGKAPKLLIYYSSNRYTGVPSRFSGSGSGTDFTLTISSLQPEDFATYYCQQDYSSPYTFGQGTKLEIK

SEQ ID NO: 223 - protein, 152 aa, Artificial Sequence
  Spacer-huCD147 3A11 Lc1-440.1-2011 VL domain
QGQSGQGTCLHLTRFNYLSCGGGSSGGSISSGLLSGRSDNPGGGSDIQMTQSPSSLSASVGDRVTITCRASQSVRTDVGWYQQKPGKAPKLLIYYSSNRYTGVPSRFSGSGSGTDFTLTISSLQPEDFATYYCQQDYSSPYTFGQGTKLEIK

SEQ ID NO: 224 - protein, 156 aa, Artificial Sequence
  Spacer-huCD147 3A11 Lc1-440.1-3011 VL domain
QGQSGQGTCLHLTRFNYLSCGGGSSGGSAVGLLAPPGGLSGRSDNPGGSDIQMTQSPSSLSASVGDRVTITCRASQSVRTDVGWYQQKPGKAPKLLIYYSSNRYTGVPSRFSGSGSGTDFTLTISSLQPEDFATYYCQQDYSSPYTFGQGTKLEIK

SEQ ID NO: 225 - protein, 156 aa, Artificial Sequence
  Spacer-huCD147 3A11 Lc1-440.1-3012 VL domain
QGQSGQGTCLHLTRFNYLSCGGGSSGGSAVGLLAPPGGLSGRSANPGGSDIQMTQSPSSLSASVGDRVTITCRASQSVRTDVGWYQQKPGKAPKLLIYYSSNRYTGVPSRFSGSGSGTDFTLTISSLQPEDFATYYCQQDYSSPYTFGQGTKLEIK

SEQ ID NO: 226 - protein, 152 aa, Artificial Sequence
  Spacer-huCD147 3A11 Lc1-440.1-2013 VL domain
QGQSGQGTCLHLTRFNYLSCGGGSSGGSISSGLLSGRSANIGGGSDIQMTQSPSSLSASVGDRVTITCRASQSVRTDVGWYQQKPGKAPKLLIYYSSNRYTGVPSRFSGSGSGTDFTLTISSLQPEDFATYYCQQDYSSPYTFGQGTKLEIK

SEQ ID NO: 227 - protein, 156 aa, Artificial Sequence
  Spacer-huCD147 3A11 Lc1-440.1-3013 VL domain
QGQSGQGTCLHLTRFNYLSCGGGSSGGSAVGLLAPPGGLSGRSANIGGSDIQMTQSPSSLSASVGDRVTITCRASQSVRTDVGWYQQKPGKAPKLLIYYSSNRYTGVPSRFSGSGSGTDFTLTISSLQPEDFATYYCQQDYSSPYTFGQGTKLEIK

SEQ ID NO: 228-229 - skipped (2 entries)

SEQ ID NO: 230 - protein, 258 aa, Artificial Sequence
  huCD147 3A11 Lc1-215-3001
RYQSCHSYWCTEGNHGGGSSGGSAVGLLAPPGGLSGRSDNHGGSDIQMTQSPSSLSASVGDRVTITCRASQSVRTDVGWYQQKPGKAPKLLIYYSSNRYTGVPSRFSGSGSGTDFTLTISSLQPEDFATYYCQQDYSSPYTFGQGTKLEIKRTVAAPSVFIFPPSDEQLKSGTASVVCLLNNFYPREAKVQWKVDNALQSGNSQESVTEQDSKDSTYSLSSTLTLSKADYEKHKVYACEVTHQGLSSPVTKSFNRGEC

SEQ ID NO: 231 - protein, 258 aa, Artificial Sequence
  huCD147 3A11 Lc1-216-3001
HGPCHYNFNSGCAQFGGGSSGGSAVGLLAPPGGLSGRSDNHGGSDIQMTQSPSSLSASVGDRVTITCRASQSVRTDVGWYQQKPGKAPKLLIYYSSNRYTGVPSRFSGSGSGTDFTLTISSLQPEDFATYYCQQDYSSPYTFGQGTKLEIKRTVAAPSVFIFPPSDEQLKSGTASVVCLLNNFYPREAKVQWKVDNALQSGNSQESVTEQDSKDSTYSLSSTLTLSKADYEKHKVYACEVTHQGLSSPVTKSFNRGEC

SEQ ID NO: 232 - protein, 258 aa, Artificial Sequence
  huCD147 3A11 Lc1-217-3001
QSLFCSGFRCDQYASGGGSSGGSAVGLLAPPGGLSGRSDNHGGSDIQMTQSPSSLSASVGDRVTITCRASQSVRTDVGWYQQKPGKAPKLLIYYSSNRYTGVPSRFSGSGSGTDFTLTISSLQPEDFATYYCQQDYSSPYTFGQGTKLEIKRTVAAPSVFIFPPSDEQLKSGTASVVCLLNNFYPREAKVQWKVDNALQSGNSQESVTEQDSKDSTYSLSSTLTLSKADYEKHKVYACEVTHQGLSSPVTKSFNRGEC

SEQ ID NO: 233 - protein, 258 aa, Artificial Sequence
  huCD147 3A11 Lc1-221-3001
DHGPCHYVSCTTINHGGGSSGGSAVGLLAPPGGLSGRSDNHGGSDIQMTQSPSSLSASVGDRVTITCRASQSVRTDVGWYQQKPGKAPKLLIYYSSNRYTGVPSRFSGSGSGTDFTLTISSLQPEDFATYYCQQDYSSPYTFGQGTKLEIKRTVAAPSVFIFPPSDEQLKSGTASVVCLLNNFYPREAKVQWKVDNALQSGNSQESVTEQDSKDSTYSLSSTLTLSKADYEKHKVYACEVTHQGLSSPVTKSFNRGEC

SEQ ID NO: 234 - protein, 258 aa, Artificial Sequence
  huCD147 3A11 Lc1-253-3001
VHGPCHWSVECLSNVGGGSSGGSAVGLLAPPGGLSGRSDNHGGSDIQMTQSPSSLSASVGDRVTITCRASQSVRTDVGWYQQKPGKAPKLLIYYSSNRYTGVPSRFSGSGSGTDFTLTISSLQPEDFATYYCQQDYSSPYTFGQGTKLEIKRTVAAPSVFIFPPSDEQLKSGTASVVCLLNNFYPREAKVQWKVDNALQSGNSQESVTEQDSKDSTYSLSSTLTLSKADYEKHKVYACEVTHQGLSSPVTKSFNRGEC

SEQ ID NO: 235 - protein, 258 aa, Artificial Sequence
  huCD147 3A11 Lc1-414-3001
THGPCHFKPNCSYPTGGGSSGGSAVGLLAPPGGLSGRSDNHGGSDIQMTQSPSSLSASVGDRVTITCRASQSVRTDVGWYQQKPGKAPKLLIYYSSNRYTGVPSRFSGSGSGTDFTLTISSLQPEDFATYYCQQDYSSPYTFGQGTKLEIKRTVAAPSVFIFPPSDEQLKSGTASVVCLLNNFYPREAKVQWKVDNALQSGNSQESVTEQDSKDSTYSLSSTLTLSKADYEKHKVYACEVTHQGLSSPVTKSFNRGEC

SEQ ID NO: 236 - protein, 258 aa, Artificial Sequence
  huCD147 3A11 Lc1-415-3001
LHGPCHFNNCNTLKLGGGSSGGSAVGLLAPPGGLSGRSDNHGGSDIQMTQSPSSLSASVGDRVTITCRASQSVRTDVGWYQQKPGKAPKLLIYYSSNRYTGVPSRFSGSGSGTDFTLTISSLQPEDFATYYCQQDYSSPYTFGQGTKLEIKRTVAAPSVFIFPPSDEQLKSGTASVVCLLNNFYPREAKVQWKVDNALQSGNSQESVTEQDSKDSTYSLSSTLTLSKADYEKHKVYACEVTHQGLSSPVTKSFNRGEC

SEQ ID NO: 237 - protein, 258 aa, Artificial Sequence
  huCD147 3A11 Lc1-416-3001
WQRECSQKNICQYYIGGGSSGGSAVGLLAPPGGLSGRSDNHGGSDIQMTQSPSSLSASVGDRVTITCRASQSVRTDVGWYQQKPGKAPKLLIYYSSNRYTGVPSRFSGSGSGTDFTLTISSLQPEDFATYYCQQDYSSPYTFGQGTKLEIKRTVAAPSVFIFPPSDEQLKSGTASVVCLLNNFYPREAKVQWKVDNALQSGNSQESVTEQDSKDSTYSLSSTLTLSKADYEKHKVYACEVTHQGLSSPVTKSFNRGEC

SEQ ID NO: 238 - protein, 258 aa, Artificial Sequence
  huCD147 3A11 Lc1-419-3001
LHGPCHYDLKCKNNTGGGSSGGSAVGLLAPPGGLSGRSDNHGGSDIQMTQSPSSLSASVGDRVTITCRASQSVRTDVGWYQQKPGKAPKLLIYYSSNRYTGVPSRFSGSGSGTDFTLTISSLQPEDFATYYCQQDYSSPYTFGQGTKLEIKRTVAAPSVFIFPPSDEQLKSGTASVVCLLNNFYPREAKVQWKVDNALQSGNSQESVTEQDSKDSTYSLSSTLTLSKADYEKHKVYACEVTHQGLSSPVTKSFNRGEC

SEQ ID NO: 239 - protein, 258 aa, Artificial Sequence
  huCD147 3A11 Lc1-422-3001
LHGPCHYMNTCHNVKGGGSSGGSAVGLLAPPGGLSGRSDNHGGSDIQMTQSPSSLSASVGDRVTITCRASQSVRTDVGWYQQKPGKAPKLLIYYSSNRYTGVPSRFSGSGSGTDFTLTISSLQPEDFATYYCQQDYSSPYTFGQGTKLEIKRTVAAPSVFIFPPSDEQLKSGTASVVCLLNNFYPREAKVQWKVDNALQSGNSQESVTEQDSKDSTYSLSSTLTLSKADYEKHKVYACEVTHQGLSSPVTKSFNRGEC

SEQ ID NO: 240 - protein, 258 aa, Artificial Sequence
  huCD147 3A11 Lc1-423-3001
FSCGFRGGYMRLCGGGGGSSGGSAVGLLAPPGGLSGRSDNHGGSDIQMTQSPSSLSASVGDRVTITCRASQSVRTDVGWYQQKPGKAPKLLIYYSSNRYTGVPSRFSGSGSGTDFTLTISSLQPEDFATYYCQQDYSSPYTFGQGTKLEIKRTVAAPSVFIFPPSDEQLKSGTASVVCLLNNFYPREAKVQWKVDNALQSGNSQESVTEQDSKDSTYSLSSTLTLSKADYEKHKVYACEVTHQGLSSPVTKSFNRGEC

SEQ ID NO: 241 - protein, 258 aa, Artificial Sequence
  huCD147 3A11 Lc1-427-3001
KHGPCHFRLCPQNTSGGGSSGGSAVGLLAPPGGLSGRSDNHGGSDIQMTQSPSSLSASVGDRVTITCRASQSVRTDVGWYQQKPGKAPKLLIYYSSNRYTGVPSRFSGSGSGTDFTLTISSLQPEDFATYYCQQDYSSPYTFGQGTKLEIKRTVAAPSVFIFPPSDEQLKSGTASVVCLLNNFYPREAKVQWKVDNALQSGNSQESVTEQDSKDSTYSLSSTLTLSKADYEKHKVYACEVTHQGLSSPVTKSFNRGEC

SEQ ID NO: 242 - protein, 258 aa, Artificial Sequence
  huCD147 3A11 Lc1-428-3001
WHGPCHYTKCDDHTMGGGSSGGSAVGLLAPPGGLSGRSDNHGGSDIQMTQSPSSLSASVGDRVTITCRASQSVRTDVGWYQQKPGKAPKLLIYYSSNRYTGVPSRFSGSGSGTDFTLTISSLQPEDFATYYCQQDYSSPYTFGQGTKLEIKRTVAAPSVFIFPPSDEQLKSGTASVVCLLNNFYPREAKVQWKVDNALQSGNSQESVTEQDSKDSTYSLSSTLTLSKADYEKHKVYACEVTHQGLSSPVTKSFNRGEC

SEQ ID NO: 243 - protein, 258 aa, Artificial Sequence
  huCD147 3A11 Lc1-440-3001
TCLHLTRFNYLSCNKGGGSSGGSAVGLLAPPGGLSGRSDNHGGSDIQMTQSPSSLSASVGDRVTITCRASQSVRTDVGWYQQKPGKAPKLLIYYSSNRYTGVPSRFSGSGSGTDFTLTISSLQPEDFATYYCQQDYSSPYTFGQGTKLEIKRTVAAPSVFIFPPSDEQLKSGTASVVCLLNNFYPREAKVQWKVDNALQSGNSQESVTEQDSKDSTYSLSSTLTLSKADYEKHKVYACEVTHQGLSSPVTKSFNRGEC

SEQ ID NO: 244 - protein, 258 aa, Artificial Sequence
  huCD147 3A11 Lc1-443-3001
AHGPCHYNTECNSNKGGGSSGGSAVGLLAPPGGLSGRSDNHGGSDIQMTQSPSSLSASVGDRVTITCRASQSVRTDVGWYQQKPGKAPKLLIYYSSNRYTGVPSRFSGSGSGTDFTLTISSLQPEDFATYYCQQDYSSPYTFGQGTKLEIKRTVAAPSVFIFPPSDEQLKSGTASVVCLLNNFYPREAKVQWKVDNALQSGNSQESVTEQDSKDSTYSLSSTLTLSKADYEKHKVYACEVTHQGLSSPVTKSFNRGEC

SEQ ID NO: 245 - protein, 258 aa, Artificial Sequence
  huCD147 3A11 Lc1-444-3001
THGPCHYKECDWMTIGGGSSGGSAVGLLAPPGGLSGRSDNHGGSDIQMTQSPSSLSASVGDRVTITCRASQSVRTDVGWYQQKPGKAPKLLIYYSSNRYTGVPSRFSGSGSGTDFTLTISSLQPEDFATYYCQQDYSSPYTFGQGTKLEIKRTVAAPSVFIFPPSDEQLKSGTASVVCLLNNFYPREAKVQWKVDNALQSGNSQESVTEQDSKDSTYSLSSTLTLSKADYEKHKVYACEVTHQGLSSPVTKSFNRGEC

SEQ ID NO: 246 - protein, 258 aa, Artificial Sequence
  huCD147 3A11 Lc1-445-3001
SHGPCHFDYQCINNTGGGSSGGSAVGLLAPPGGLSGRSDNHGGSDIQMTQSPSSLSASVGDRVTITCRASQSVRTDVGWYQQKPGKAPKLLIYYSSNRYTGVPSRFSGSGSGTDFTLTISSLQPEDFATYYCQQDYSSPYTFGQGTKLEIKRTVAAPSVFIFPPSDEQLKSGTASVVCLLNNFYPREAKVQWKVDNALQSGNSQESVTEQDSKDSTYSLSSTLTLSKADYEKHKVYACEVTHQGLSSPVTKSFNRGEC

SEQ ID NO: 247 - protein, 254 aa, Artificial Sequence
  huCD147 3A11 Lc1-414.1-3001
THGPCHFKPNCGGGSSGGSAVGLLAPPGGLSGRSDNHGGSDIQMTQSPSSLSASVGDRVTITCRASQSVRTDVGWYQQKPGKAPKLLIYYSSNRYTGVPSRFSGSGSGTDFTLTISSLQPEDFATYYCQQDYSSPYTFGQGTKLEIKRTVAAPSVFIFPPSDEQLKSGTASVVCLLNNFYPREAKVQWKVDNALQSGNSQESVTEQDSKDSTYSLSSTLTLSKADYEKHKVYACEVTHQGLSSPVTKSFNRGEC

SEQ ID NO: 248 - protein, 258 aa, Artificial Sequence
  huCD147 3A11 Lc1-414.2-3001
THGPCHFKPQCSYPTGGGSSGGSAVGLLAPPGGLSGRSDNHGGSDIQMTQSPSSLSASVGDRVTITCRASQSVRTDVGWYQQKPGKAPKLLIYYSSNRYTGVPSRFSGSGSGTDFTLTISSLQPEDFATYYCQQDYSSPYTFGQGTKLEIKRTVAAPSVFIFPPSDEQLKSGTASVVCLLNNFYPREAKVQWKVDNALQSGNSQESVTEQDSKDSTYSLSSTLTLSKADYEKHKVYACEVTHQGLSSPVTKSFNRGEC

SEQ ID NO: 249 - protein, 258 aa, Artificial Sequence
  huCD147 3A11 Lc1-414.3-3001
THGPCHFKPNCAYPTGGGSSGGSAVGLLAPPGGLSGRSDNHGGSDIQMTQSPSSLSASVGDRVTITCRASQSVRTDVGWYQQKPGKAPKLLIYYSSNRYTGVPSRFSGSGSGTDFTLTISSLQPEDFATYYCQQDYSSPYTFGQGTKLEIKRTVAAPSVFIFPPSDEQLKSGTASVVCLLNNFYPREAKVQWKVDNALQSGNSQESVTEQDSKDSTYSLSSTLTLSKADYEKHKVYACEVTHQGLSSPVTKSFNRGEC

SEQ ID NO: 250 - protein, 258 aa, Artificial Sequence
  huCD147 3A11 Lc1-419.1-3001
LHGPCHYDLKCKQNTGGGSSGGSAVGLLAPPGGLSGRSDNHGGSDIQMTQSPSSLSASVGDRVTITCRASQSVRTDVGWYQQKPGKAPKLLIYYSSNRYTGVPSRFSGSGSGTDFTLTISSLQPEDFATYYCQQDYSSPYTFGQGTKLEIKRTVAAPSVFIFPPSDEQLKSGTASVVCLLNNFYPREAKVQWKVDNALQSGNSQESVTEQDSKDSTYSLSSTLTLSKADYEKHKVYACEVTHQGLSSPVTKSFNRGEC

SEQ ID NO: 251 - protein, 257 aa, Artificial Sequence
  huCD147 3A11 Lc1-419.2-3001
LHGPCHYDLKCKNNGGGSSGGSAVGLLAPPGGLSGRSDNHGGSDIQMTQSPSSLSASVGDRVTITCRASQSVRTDVGWYQQKPGKAPKLLIYYSSNRYTGVPSRFSGSGSGTDFTLTISSLQPEDFATYYCQQDYSSPYTFGQGTKLEIKRTVAAPSVFIFPPSDEQLKSGTASVVCLLNNFYPREAKVQWKVDNALQSGNSQESVTEQDSKDSTYSLSSTLTLSKADYEKHKVYACEVTHQGLSSPVTKSFNRGEC

SEQ ID NO: 252 - protein, 255 aa, Artificial Sequence
  huCD147 3A11 Lc1-419.3-3001
LHGPCHYDLKCKGGGSSGGSAVGLLAPPGGLSGRSDNHGGSDIQMTQSPSSLSASVGDRVTITCRASQSVRTDVGWYQQKPGKAPKLLIYYSSNRYTGVPSRFSGSGSGTDFTLTISSLQPEDFATYYCQQDYSSPYTFGQGTKLEIKRTVAAPSVFIFPPSDEQLKSGTASVVCLLNNFYPREAKVQWKVDNALQSGNSQESVTEQDSKDSTYSLSSTLTLSKADYEKHKVYACEVTHQGLSSPVTKSFNRGEC

SEQ ID NO: 253 - protein, 254 aa, Artificial Sequence
  huCD147 3A11 Lc1-414.3-2012
THGPCHFKPNCAYPTGGGSSGGSISSGLLSGRSANPGGGSDIQMTQSPSSLSASVGDRVTITCRASQSVRTDVGWYQQKPGKAPKLLIYYSSNRYTGVPSRFSGSGSGTDFTLTISSLQPEDFATYYCQQDYSSPYTFGQGTKLEIKRTVAAPSVFIFPPSDEQLKSGTASVVCLLNNFYPREAKVQWKVDNALQSGNSQESVTEQDSKDSTYSLSSTLTLSKADYEKHKVYACEVTHQGLSSPVTKSFNRGEC

SEQ ID NO: 254 - protein, 254 aa, Artificial Sequence
  huCD147 3A11 Lc1-414.4-2012
THGPCHFRPNCAYPTGGGSSGGSISSGLLSGRSANPGGGSDIQMTQSPSSLSASVGDRVTITCRASQSVRTDVGWYQQKPGKAPKLLIYYSSNRYTGVPSRFSGSGSGTDFTLTISSLQPEDFATYYCQQDYSSPYTFGQGTKLEIKRTVAAPSVFIFPPSDEQLKSGTASVVCLLNNFYPREAKVQWKVDNALQSGNSQESVTEQDSKDSTYSLSSTLTLSKADYEKHKVYACEVTHQGLSSPVTKSFNRGEC

SEQ ID NO: 255 - protein, 254 aa, Artificial Sequence
  huCD147 3A11 Lc1-415-2012
LHGPCHFNNCNTLKLGGGSSGGSISSGLLSGRSANPGGGSDIQMTQSPSSLSASVGDRVTITCRASQSVRTDVGWYQQKPGKAPKLLIYYSSNRYTGVPSRFSGSGSGTDFTLTISSLQPEDFATYYCQQDYSSPYTFGQGTKLEIKRTVAAPSVFIFPPSDEQLKSGTASVVCLLNNFYPREAKVQWKVDNALQSGNSQESVTEQDSKDSTYSLSSTLTLSKADYEKHKVYACEVTHQGLSSPVTKSFNRGEC

SEQ ID NO: 256 - protein, 252 aa, Artificial Sequence
  huCD147 3A11 Lc1-415.1-2012
LHGPCHFNNCNTLGGGSSGGSISSGLLSGRSANPGGGSDIQMTQSPSSLSASVGDRVTITCRASQSVRTDVGWYQQKPGKAPKLLIYYSSNRYTGVPSRFSGSGSGTDFTLTISSLQPEDFATYYCQQDYSSPYTFGQGTKLEIKRTVAAPSVFIFPPSDEQLKSGTASVVCLLNNFYPREAKVQWKVDNALQSGNSQESVTEQDSKDSTYSLSSTLTLSKADYEKHKVYACEVTHQGLSSPVTKSFNRGEC

SEQ ID NO: 257 - protein, 251 aa, Artificial Sequence
  huCD147 3A11 Lc1-419.3-2012
LHGPCHYDLKCKGGGSSGGSISSGLLSGRSANPGGGSDIQMTQSPSSLSASVGDRVTITCRASQSVRTDVGWYQQKPGKAPKLLIYYSSNRYTGVPSRFSGSGSGTDFTLTISSLQPEDFATYYCQQDYSSPYTFGQGTKLEIKRTVAAPSVFIFPPSDEQLKSGTASVVCLLNNFYPREAKVQWKVDNALQSGNSQESVTEQDSKDSTYSLSSTLTLSKADYEKHKVYACEVTHQGLSSPVTKSFNRGEC

SEQ ID NO: 258 - protein, 250 aa, Artificial Sequence
  huCD147 3A11 Lc1-419.4-2012
LHGPCHYDLKCGGGSSGGSISSGLLSGRSANPGGGSDIQMTQSPSSLSASVGDRVTITCRASQSVRTDVGWYQQKPGKAPKLLIYYSSNRYTGVPSRFSGSGSGTDFTLTISSLQPEDFATYYCQQDYSSPYTFGQGTKLEIKRTVAAPSVFIFPPSDEQLKSGTASVVCLLNNFYPREAKVQWKVDNALQSGNSQESVTEQDSKDSTYSLSSTLTLSKADYEKHKVYACEVTHQGLSSPVTKSFNRGEC

SEQ ID NO: 259 - protein, 250 aa, Artificial Sequence
  huCD147 3A11 Lc1-419.5-2012
LHGPCHYDLRCGGGSSGGSISSGLLSGRSANPGGGSDIQMTQSPSSLSASVGDRVTITCRASQSVRTDVGWYQQKPGKAPKLLIYYSSNRYTGVPSRFSGSGSGTDFTLTISSLQPEDFATYYCQQDYSSPYTFGQGTKLEIKRTVAAPSVFIFPPSDEQLKSGTASVVCLLNNFYPREAKVQWKVDNALQSGNSQESVTEQDSKDSTYSLSSTLTLSKADYEKHKVYACEVTHQGLSSPVTKSFNRGEC

SEQ ID NO: 260 - protein, 254 aa, Artificial Sequence
  huCD147 3A11 Lc1-440-2012
TCLHLTRFNYLSCNKGGGSSGGSISSGLLSGRSANPGGGSDIQMTQSPSSLSASVGDRVTITCRASQSVRTDVGWYQQKPGKAPKLLIYYSSNRYTGVPSRFSGSGSGTDFTLTISSLQPEDFATYYCQQDYSSPYTFGQGTKLEIKRTVAAPSVFIFPPSDEQLKSGTASVVCLLNNFYPREAKVQWKVDNALQSGNSQESVTEQDSKDSTYSLSSTLTLSKADYEKHKVYACEVTHQGLSSPVTKSFNRGEC

SEQ ID NO: 261 - protein, 252 aa, Artificial Sequence
  huCD147 3A11 Lc1-440.1-2012
TCLHLTRFNYLSCGGGSSGGSISSGLLSGRSANPGGGSDIQMTQSPSSLSASVGDRVTITCRASQSVRTDVGWYQQKPGKAPKLLIYYSSNRYTGVPSRFSGSGSGTDFTLTISSLQPEDFATYYCQQDYSSPYTFGQGTKLEIKRTVAAPSVFIFPPSDEQLKSGTASVVCLLNNFYPREAKVQWKVDNALQSGNSQESVTEQDSKDSTYSLSSTLTLSKADYEKHKVYACEVTHQGLSSPVTKSFNRGEC

SEQ ID NO: 262 - protein, 252 aa, Artificial Sequence
  huCD147 3A11 Lc1-440.1-2001
TCLHLTRFNYLSCGGGSSGGSISSGLLSGRSDNHGGGSDIQMTQSPSSLSASVGDRVTITCRASQSVRTDVGWYQQKPGKAPKLLIYYSSNRYTGVPSRFSGSGSGTDFTLTISSLQPEDFATYYCQQDYSSPYTFGQGTKLEIKRTVAAPSVFIFPPSDEQLKSGTASVVCLLNNFYPREAKVQWKVDNALQSGNSQESVTEQDSKDSTYSLSSTLTLSKADYEKHKVYACEVTHQGLSSPVTKSFNRGEC

SEQ ID NO: 263 - protein, 256 aa, Artificial Sequence
  huCD147 3A11 Lc1-440.1-3001
TCLHLTRFNYLSCGGGSSGGSAVGLLAPPGGLSGRSDNHGGSDIQMTQSPSSLSASVGDRVTITCRASQSVRTDVGWYQQKPGKAPKLLIYYSSNRYTGVPSRFSGSGSGTDFTLTISSLQPEDFATYYCQQDYSSPYTFGQGTKLEIKRTVAAPSVFIFPPSDEQLKSGTASVVCLLNNFYPREAKVQWKVDNALQSGNSQESVTEQDSKDSTYSLSSTLTLSKADYEKHKVYACEVTHQGLSSPVTKSFNRGEC

SEQ ID NO: 264 - protein, 252 aa, Artificial Sequence
  huCD147 3A11 Lc1-440.1-2007
TCLHLTRFNYLSCGGGSSGGSISSGLLSGRSDIHGGGSDIQMTQSPSSLSASVGDRVTITCRASQSVRTDVGWYQQKPGKAPKLLIYYSSNRYTGVPSRFSGSGSGTDFTLTISSLQPEDFATYYCQQDYSSPYTFGQGTKLEIKRTVAAPSVFIFPPSDEQLKSGTASVVCLLNNFYPREAKVQWKVDNALQSGNSQESVTEQDSKDSTYSLSSTLTLSKADYEKHKVYACEVTHQGLSSPVTKSFNRGEC

SEQ ID NO: 265 - protein, 256 aa, Artificial Sequence
  huCD147 3A11 Lc1-440.1-3007
TCLHLTRFNYLSCGGGSSGGSAVGLLAPPGGLSGRSDIHGGSDIQMTQSPSSLSASVGDRVTITCRASQSVRTDVGWYQQKPGKAPKLLIYYSSNRYTGVPSRFSGSGSGTDFTLTISSLQPEDFATYYCQQDYSSPYTFGQGTKLEIKRTVAAPSVFIFPPSDEQLKSGTASVVCLLNNFYPREAKVQWKVDNALQSGNSQESVTEQDSKDSTYSLSSTLTLSKADYEKHKVYACEVTHQGLSSPVTKSFNRGEC

SEQ ID NO: 266 - protein, 252 aa, Artificial Sequence
  huCD147 3A11 Lc1-440.1-2008
TCLHLTRFNYLSCGGGSSGGSISSGLLSGRSDQHGGGSDIQMTQSPSSLSASVGDRVTITCRASQSVRTDVGWYQQKPGKAPKLLIYYSSNRYTGVPSRFSGSGSGTDFTLTISSLQPEDFATYYCQQDYSSPYTFGQGTKLEIKRTVAAPSVFIFPPSDEQLKSGTASVVCLLNNFYPREAKVQWKVDNALQSGNSQESVTEQDSKDSTYSLSSTLTLSKADYEKHKVYACEVTHQGLSSPVTKSFNRGEC

SEQ ID NO: 267 - protein, 256 aa, Artificial Sequence
  huCD147 3A11 Lc1-440.1-3008
TCLHLTRFNYLSCGGGSSGGSAVGLLAPPGGLSGRSDQHGGSDIQMTQSPSSLSASVGDRVTITCRASQSVRTDVGWYQQKPGKAPKLLIYYSSNRYTGVPSRFSGSGSGTDFTLTISSLQPEDFATYYCQQDYSSPYTFGQGTKLEIKRTVAAPSVFIFPPSDEQLKSGTASVVCLLNNFYPREAKVQWKVDNALQSGNSQESVTEQDSKDSTYSLSSTLTLSKADYEKHKVYACEVTHQGLSSPVTKSFNRGEC

SEQ ID NO: 268 - protein, 252 aa, Artificial Sequence
  huCD147 3A11 Lc1-440.1-2011
TCLHLTRFNYLSCGGGSSGGSISSGLLSGRSDNPGGGSDIQMTQSPSSLSASVGDRVTITCRASQSVRTDVGWYQQKPGKAPKLLIYYSSNRYTGVPSRFSGSGSGTDFTLTISSLQPEDFATYYCQQDYSSPYTFGQGTKLEIKRTVAAPSVFIFPPSDEQLKSGTASVVCLLNNFYPREAKVQWKVDNALQSGNSQESVTEQDSKDSTYSLSSTLTLSKADYEKHKVYACEVTHQGLSSPVTKSFNRGEC

SEQ ID NO: 269 - protein, 256 aa, Artificial Sequence
  huCD147 3A11 Lc1-440.1-3011
TCLHLTRFNYLSCGGGSSGGSAVGLLAPPGGLSGRSDNPGGSDIQMTQSPSSLSASVGDRVTITCRASQSVRTDVGWYQQKPGKAPKLLIYYSSNRYTGVPSRFSGSGSGTDFTLTISSLQPEDFATYYCQQDYSSPYTFGQGTKLEIKRTVAAPSVFIFPPSDEQLKSGTASVVCLLNNFYPREAKVQWKVDNALQSGNSQESVTEQDSKDSTYSLSSTLTLSKADYEKHKVYACEVTHQGLSSPVTKSFNRGEC

SEQ ID NO: 270 - protein, 256 aa, Artificial Sequence
  huCD147 3A11 Lc1-440.1-3012
TCLHLTRFNYLSCGGGSSGGSAVGLLAPPGGLSGRSANPGGSDIQMTQSPSSLSASVGDRVTITCRASQSVRTDVGWYQQKPGKAPKLLIYYSSNRYTGVPSRFSGSGSGTDFTLTISSLQPEDFATYYCQQDYSSPYTFGQGTKLEIKRTVAAPSVFIFPPSDEQLKSGTASVVCLLNNFYPREAKVQWKVDNALQSGNSQESVTEQDSKDSTYSLSSTLTLSKADYEKHKVYACEVTHQGLSSPVTKSFNRGEC

SEQ ID NO: 271 - protein, 252 aa, Artificial Sequence
  huCD147 3A11 Lc1-440.1-2013
TCLHLTRFNYLSCGGGSSGGSISSGLLSGRSANIGGGSDIQMTQSPSSLSASVGDRVTITCRASQSVRTDVGWYQQKPGKAPKLLIYYSSNRYTGVPSRFSGSGSGTDFTLTISSLQPEDFATYYCQQDYSSPYTFGQGTKLEIKRTVAAPSVFIFPPSDEQLKSGTASVVCLLNNFYPREAKVQWKVDNALQSGNSQESVTEQDSKDSTYSLSSTLTLSKADYEKHKVYACEVTHQGLSSPVTKSFNRGEC

SEQ ID NO: 272 - protein, 256 aa, Artificial Sequence
  huCD147 3A11 Lc1-440.1-3013
TCLHLTRFNYLSCGGGSSGGSAVGLLAPPGGLSGRSANIGGSDIQMTQSPSSLSASVGDRVTITCRASQSVRTDVGWYQQKPGKAPKLLIYYSSNRYTGVPSRFSGSGSGTDFTLTISSLQPEDFATYYCQQDYSSPYTFGQGTKLEIKRTVAAPSVFIFPPSDEQLKSGTASVVCLLNNFYPREAKVQWKVDNALQSGNSQESVTEQDSKDSTYSLSSTLTLSKADYEKHKVYACEVTHQGLSSPVTKSFNRGEC

SEQ ID NO: 273-274 - skipped (2 entries)

SEQ ID NO: 275 - protein, 265 aa, Artificial Sequence
  Spacer-huCD147 3A11 Lc1-215-3001
QGQSGQGRYQSCHSYWCTEGNHGGGSSGGSAVGLLAPPGGLSGRSDNHGGSDIQMTQSPSSLSASVGDRVTITCRASQSVRTDVGWYQQKPGKAPKLLIYYSSNRYTGVPSRFSGSGSGTDFTLTISSLQPEDFATYYCQQDYSSPYTFGQGTKLEIKRTVAAPSVFIFPPSDEQLKSGTASVVCLLNNFYPREAKVQWKVDNALQSGNSQESVTEQDSKDSTYSLSSTLTLSKADYEKHKVYACEVTHQGLSSPVTKSFNRGEC

SEQ ID NO: 276 - protein, 265 aa, Artificial Sequence
  Spacer-huCD147 3A11 Lc1-216-3001
QGQSGQGHGPCHYNFNSGCAQFGGGSSGGSAVGLLAPPGGLSGRSDNHGGSDIQMTQSPSSLSASVGDRVTITCRASQSVRTDVGWYQQKPGKAPKLLIYYSSNRYTGVPSRFSGSGSGTDFTLTISSLQPEDFATYYCQQDYSSPYTFGQGTKLEIKRTVAAPSVFIFPPSDEQLKSGTASVVCLLNNFYPREAKVQWKVDNALQSGNSQESVTEQDSKDSTYSLSSTLTLSKADYEKHKVYACEVTHQGLSSPVTKSFNRGEC

SEQ ID NO: 277 - protein, 265 aa, Artificial Sequence
  Spacer-huCD147 3A11 Lc1-217-3001
QGQSGQGQSLFCSGFRCDQYASGGGSSGGSAVGLLAPPGGLSGRSDNHGGSDIQMTQSPSSLSASVGDRVTITCRASQSVRTDVGWYQQKPGKAPKLLIYYSSNRYTGVPSRFSGSGSGTDFTLTISSLQPEDFATYYCQQDYSSPYTFGQGTKLEIKRTVAAPSVFIFPPSDEQLKSGTASVVCLLNNFYPREAKVQWKVDNALQSGNSQESVTEQDSKDSTYSLSSTLTLSKADYEKHKVYACEVTHQGLSSPVTKSFNRGEC

SEQ ID NO: 278 - protein, 265 aa, Artificial Sequence
  Spacer-huCD147 3A11 Lc1-221-3001
QGQSGQGDHGPCHYVSCTTINHGGGSSGGSAVGLLAPPGGLSGRSDNHGGSDIQMTQSPSSLSASVGDRVTITCRASQSVRTDVGWYQQKPGKAPKLLIYYSSNRYTGVPSRFSGSGSGTDFTLTISSLQPEDFATYYCQQDYSSPYTFGQGTKLEIKRTVAAPSVFIFPPSDEQLKSGTASVVCLLNNFYPREAKVQWKVDNALQSGNSQESVTEQDSKDSTYSLSSTLTLSKADYEKHKVYACEVTHQGLSSPVTKSFNRGEC

SEQ ID NO: 279 - protein, 265 aa, Artificial Sequence
  Spacer-huCD147 3A11 Lc1-253-3001
QGQSGQGVHGPCHWSVECLSNVGGGSSGGSAVGLLAPPGGLSGRSDNHGGSDIQMTQSPSSLSASVGDRVTITCRASQSVRTDVGWYQQKPGKAPKLLIYYSSNRYTGVPSRFSGSGSGTDFTLTISSLQPEDFATYYCQQDYSSPYTFGQGTKLEIKRTVAAPSVFIFPPSDEQLKSGTASVVCLLNNFYPREAKVQWKVDNALQSGNSQESVTEQDSKDSTYSLSSTLTLSKADYEKHKVYACEVTHQGLSSPVTKSFNRGEC

SEQ ID NO: 280 - protein, 265 aa, Artificial Sequence
  Spacer-huCD147 3A11 Lc1-414-3001
QGQSGQGTHGPCHFKPNCSYPTGGGSSGGSAVGLLAPPGGLSGRSDNHGGSDIQMTQSPSSLSASVGDRVTITCRASQSVRTDVGWYQQKPGKAPKLLIYYSSNRYTGVPSRFSGSGSGTDFTLTISSLQPEDFATYYCQQDYSSPYTFGQGTKLEIKRTVAAPSVFIFPPSDEQLKSGTASVVCLLNNFYPREAKVQWKVDNALQSGNSQESVTEQDSKDSTYSLSSTLTLSKADYEKHKVYACEVTHQGLSSPVTKSFNRGEC

SEQ ID NO: 281 - protein, 265 aa, Artificial Sequence
  Spacer-huCD147 3A11 Lc1-415-3001
QGQSGQGLHGPCHFNNCNTLKLGGGSSGGSAVGLLAPPGGLSGRSDNHGGSDIQMTQSPSSLSASVGDRVTITCRASQSVRTDVGWYQQKPGKAPKLLIYYSSNRYTGVPSRFSGSGSGTDFTLTISSLQPEDFATYYCQQDYSSPYTFGQGTKLEIKRTVAAPSVFIFPPSDEQLKSGTASVVCLLNNFYPREAKVQWKVDNALQSGNSQESVTEQDSKDSTYSLSSTLTLSKADYEKHKVYACEVTHQGLSSPVTKSFNRGEC

SEQ ID NO: 282 - protein, 265 aa, Artificial Sequence
  Spacer-huCD147 3A11 Lc1-416-3001
QGQSGQGWQRECSQKNICQYYIGGGSSGGSAVGLLAPPGGLSGRSDNHGGSDIQMTQSPSSLSASVGDRVTITCRASQSVRTDVGWYQQKPGKAPKLLIYYSSNRYTGVPSRFSGSGSGTDFTLTISSLQPEDFATYYCQQDYSSPYTFGQGTKLEIKRTVAAPSVFIFPPSDEQLKSGTASVVCLLNNFYPREAKVQWKVDNALQSGNSQESVTEQDSKDSTYSLSSTLTLSKADYEKHKVYACEVTHQGLSSPVTKSFNRGEC

SEQ ID NO: 283 - protein, 265 aa, Artificial Sequence
  Spacer-huCD147 3A11 Lc1-419-3001
QGQSGQGLHGPCHYDLKCKNNTGGGSSGGSAVGLLAPPGGLSGRSDNHGGSDIQMTQSPSSLSASVGDRVTITCRASQSVRTDVGWYQQKPGKAPKLLIYYSSNRYTGVPSRFSGSGSGTDFTLTISSLQPEDFATYYCQQDYSSPYTFGQGTKLEIKRTVAAPSVFIFPPSDEQLKSGTASVVCLLNNFYPREAKVQWKVDNALQSGNSQESVTEQDSKDSTYSLSSTLTLSKADYEKHKVYACEVTHQGLSSPVTKSFNRGEC

SEQ ID NO: 284 - protein, 265 aa, Artificial Sequence
  Spacer-huCD147 3A11 Lc1-422-3001
QGQSGQGLHGPCHYMNTCHNVKGGGSSGGSAVGLLAPPGGLSGRSDNHGGSDIQMTQSPSSLSASVGDRVTITCRASQSVRTDVGWYQQKPGKAPKLLIYYSSNRYTGVPSRFSGSGSGTDFTLTISSLQPEDFATYYCQQDYSSPYTFGQGTKLEIKRTVAAPSVFIFPPSDEQLKSGTASVVCLLNNFYPREAKVQWKVDNALQSGNSQESVTEQDSKDSTYSLSSTLTLSKADYEKHKVYACEVTHQGLSSPVTKSFNRGEC

SEQ ID NO: 285 - protein, 265 aa, Artificial Sequence
  Spacer-huCD147 3A11 Lc1-423-3001
QGQSGQGFSCGFRGGYMRLCGGGGGSSGGSAVGLLAPPGGLSGRSDNHGGSDIQMTQSPSSLSASVGDRVTITCRASQSVRTDVGWYQQKPGKAPKLLIYYSSNRYTGVPSRFSGSGSGTDFTLTISSLQPEDFATYYCQQDYSSPYTFGQGTKLEIKRTVAAPSVFIFPPSDEQLKSGTASVVCLLNNFYPREAKVQWKVDNALQSGNSQESVTEQDSKDSTYSLSSTLTLSKADYEKHKVYACEVTHQGLSSPVTKSFNRGEC

SEQ ID NO: 286 - protein, 265 aa, Artificial Sequence
  Spacer-huCD147 3A11 Lc1-427-3001
QGQSGQGKHGPCHFRLCPQNTSGGGSSGGSAVGLLAPPGGLSGRSDNHGGSDIQMTQSPSSLSASVGDRVTITCRASQSVRTDVGWYQQKPGKAPKLLIYYSSNRYTGVPSRFSGSGSGTDFTLTISSLQPEDFATYYCQQDYSSPYTFGQGTKLEIKRTVAAPSVFIFPPSDEQLKSGTASVVCLLNNFYPREAKVQWKVDNALQSGNSQESVTEQDSKDSTYSLSSTLTLSKADYEKHKVYACEVTHQGLSSPVTKSFNRGEC

SEQ ID NO: 287 - protein, 265 aa, Artificial Sequence
  Spacer-huCD147 3A11 Lc1-428-3001
QGQSGQGWHGPCHYTKCDDHTMGGGSSGGSAVGLLAPPGGLSGRSDNHGGSDIQMTQSPSSLSASVGDRVTITCRASQSVRTDVGWYQQKPGKAPKLLIYYSSNRYTGVPSRFSGSGSGTDFTLTISSLQPEDFATYYCQQDYSSPYTFGQGTKLEIKRTVAAPSVFIFPPSDEQLKSGTASVVCLLNNFYPREAKVQWKVDNALQSGNSQESVTEQDSKDSTYSLSSTLTLSKADYEKHKVYACEVTHQGLSSPVTKSFNRGEC

SEQ ID NO: 288 - protein, 265 aa, Artificial Sequence
  Spacer-huCD147 3A11 Lc1-440-3001
QGQSGQGTCLHLTRFNYLSCNKGGGSSGGSAVGLLAPPGGLSGRSDNHGGSDIQMTQSPSSLSASVGDRVTITCRASQSVRTDVGWYQQKPGKAPKLLIYYSSNRYTGVPSRFSGSGSGTDFTLTISSLQPEDFATYYCQQDYSSPYTFGQGTKLEIKRTVAAPSVFIFPPSDEQLKSGTASVVCLLNNFYPREAKVQWKVDNALQSGNSQESVTEQDSKDSTYSLSSTLTLSKADYEKHKVYACEVTHQGLSSPVTKSFNRGEC

SEQ ID NO: 289 - protein, 265 aa, Artificial Sequence
  Spacer-huCD147 3A11 Lc1-443-3001
QGQSGQGAHGPCHYNTECNSNKGGGSSGGSAVGLLAPPGGLSGRSDNHGGSDIQMTQSPSSLSASVGDRVTITCRASQSVRTDVGWYQQKPGKAPKLLIYYSSNRYTGVPSRFSGSGSGTDFTLTISSLQPEDFATYYCQQDYSSPYTFGQGTKLEIKRTVAAPSVFIFPPSDEQLKSGTASVVCLLNNFYPREAKVQWKVDNALQSGNSQESVTEQDSKDSTYSLSSTLTLSKADYEKHKVYACEVTHQGLSSPVTKSFNRGEC

SEQ ID NO: 290 - protein, 265 aa, Artificial Sequence
  Spacer-huCD147 3A11 Lc1-444-3001
QGQSGQGTHGPCHYKECDWMTIGGGSSGGSAVGLLAPPGGLSGRSDNHGGSDIQMTQSPSSLSASVGDRVTITCRASQSVRTDVGWYQQKPGKAPKLLIYYSSNRYTGVPSRFSGSGSGTDFTLTISSLQPEDFATYYCQQDYSSPYTFGQGTKLEIKRTVAAPSVFIFPPSDEQLKSGTASVVCLLNNFYPREAKVQWKVDNALQSGNSQESVTEQDSKDSTYSLSSTLTLSKADYEKHKVYACEVTHQGLSSPVTKSFNRGEC

SEQ ID NO: 291 - protein, 265 aa, Artificial Sequence
  Spacer-huCD147 3A11 Lc1-445-3001
QGQSGQGSHGPCHFDYQCINNTGGGSSGGSAVGLLAPPGGLSGRSDNHGGSDIQMTQSPSSLSASVGDRVTITCRASQSVRTDVGWYQQKPGKAPKLLIYYSSNRYTGVPSRFSGSGSGTDFTLTISSLQPEDFATYYCQQDYSSPYTFGQGTKLEIKRTVAAPSVFIFPPSDEQLKSGTASVVCLLNNFYPREAKVQWKVDNALQSGNSQESVTEQDSKDSTYSLSSTLTLSKADYEKHKVYACEVTHQGLSSPVTKSFNRGEC

SEQ ID NO: 292 - protein, 261 aa, Artificial Sequence
  Spacer-huCD147 3A11 Lc1-414.1-3001
QGQSGQGTHGPCHFKPNCGGGSSGGSAVGLLAPPGGLSGRSDNHGGSDIQMTQSPSSLSASVGDRVTITCRASQSVRTDVGWYQQKPGKAPKLLIYYSSNRYTGVPSRFSGSGSGTDFTLTISSLQPEDFATYYCQQDYSSPYTFGQGTKLEIKRTVAAPSVFIFPPSDEQLKSGTASVVCLLNNFYPREAKVQWKVDNALQSGNSQESVTEQDSKDSTYSLSSTLTLSKADYEKHKVYACEVTHQGLSSPVTKSFNRGEC

SEQ ID NO: 293 - protein, 265 aa, Artificial Sequence
  Spacer-huCD147 3A11 Lc1-414.2-3001
QGQSGQGTHGPCHFKPQCSYPTGGGSSGGSAVGLLAPPGGLSGRSDNHGGSDIQMTQSPSSLSASVGDRVTITCRASQSVRTDVGWYQQKPGKAPKLLIYYSSNRYTGVPSRFSGSGSGTDFTLTISSLQPEDFATYYCQQDYSSPYTFGQGTKLEIKRTVAAPSVFIFPPSDEQLKSGTASVVCLLNNFYPREAKVQWKVDNALQSGNSQESVTEQDSKDSTYSLSSTLTLSKADYEKHKVYACEVTHQGLSSPVTKSFNRGEC

SEQ ID NO: 294 - protein, 265 aa, Artificial Sequence
  Spacer-huCD147 3A11 Lc1-414.3-3001
QGQSGQGTHGPCHFKPNCAYPTGGGSSGGSAVGLLAPPGGLSGRSDNHGGSDIQMTQSPSSLSASVGDRVTITCRASQSVRTDVGWYQQKPGKAPKLLIYYSSNRYTGVPSRFSGSGSGTDFTLTISSLQPEDFATYYCQQDYSSPYTFGQGTKLEIKRTVAAPSVFIFPPSDEQLKSGTASVVCLLNNFYPREAKVQWKVDNALQSGNSQESVTEQDSKDSTYSLSSTLTLSKADYEKHKVYACEVTHQGLSSPVTKSFNRGEC

SEQ ID NO: 295 - protein, 265 aa, Artificial Sequence
  Spacer-huCD147 3A11 Lc1-419.1-3001
QGQSGQGLHGPCHYDLKCKQNTGGGSSGGSAVGLLAPPGGLSGRSDNHGGSDIQMTQSPSSLSASVGDRVTITCRASQSVRTDVGWYQQKPGKAPKLLIYYSSNRYTGVPSRFSGSGSGTDFTLTISSLQPEDFATYYCQQDYSSPYTFGQGTKLEIKRTVAAPSVFIFPPSDEQLKSGTASVVCLLNNFYPREAKVQWKVDNALQSGNSQESVTEQDSKDSTYSLSSTLTLSKADYEKHKVYACEVTHQGLSSPVTKSFNRGEC

SEQ ID NO: 296 - protein, 264 aa, Artificial Sequence
  Spacer-huCD147 3A11 Lc1-419.2-3001
QGQSGQGLHGPCHYDLKCKNNGGGSSGGSAVGLLAPPGGLSGRSDNHGGSDIQMTQSPSSLSASVGDRVTITCRASQSVRTDVGWYQQKPGKAPKLLIYYSSNRYTGVPSRFSGSGSGTDFTLTISSLQPEDFATYYCQQDYSSPYTFGQGTKLEIKRTVAAPSVFIFPPSDEQLKSGTASVVCLLNNFYPREAKVQWKVDNALQSGNSQESVTEQDSKDSTYSLSSTLTLSKADYEKHKVYACEVTHQGLSSPVTKSFNRGEC

SEQ ID NO: 297 - protein, 262 aa, Artificial Sequence
  Spacer-huCD147 3A11 Lc1-419.3-3001
QGQSGQGLHGPCHYDLKCKGGGSSGGSAVGLLAPPGGLSGRSDNHGGSDIQMTQSPSSLSASVGDRVTITCRASQSVRTDVGWYQQKPGKAPKLLIYYSSNRYTGVPSRFSGSGSGTDFTLTISSLQPEDFATYYCQQDYSSPYTFGQGTKLEIKRTVAAPSVFIFPPSDEQLKSGTASVVCLLNNFYPREAKVQWKVDNALQSGNSQESVTEQDSKDSTYSLSSTLTLSKADYEKHKVYACEVTHQGLSSPVTKSFNRGEC

SEQ ID NO: 298 - protein, 261 aa, Artificial Sequence
  Spacer-huCD147 3A11 Lc1-414.3-2012
QGQSGQGTHGPCHFKPNCAYPTGGGSSGGSISSGLLSGRSANPGGGSDIQMTQSPSSLSASVGDRVTITCRASQSVRTDVGWYQQKPGKAPKLLIYYSSNRYTGVPSRFSGSGSGTDFTLTISSLQPEDFATYYCQQDYSSPYTFGQGTKLEIKRTVAAPSVFIFPPSDEQLKSGTASVVCLLNNFYPREAKVQWKVDNALQSGNSQESVTEQDSKDSTYSLSSTLTLSKADYEKHKVYACEVTHQGLSSPVTKSFNRGEC

SEQ ID NO: 299 - protein, 261 aa, Artificial Sequence
  Spacer-huCD147 3A11 Lc1-414.4-2012
QGQSGQGTHGPCHFRPNCAYPTGGGSSGGSISSGLLSGRSANPGGGSDIQMTQSPSSLSASVGDRVTITCRASQSVRTDVGWYQQKPGKAPKLLIYYSSNRYTGVPSRFSGSGSGTDFTLTISSLQPEDFATYYCQQDYSSPYTFGQGTKLEIKRTVAAPSVFIFPPSDEQLKSGTASVVCLLNNFYPREAKVQWKVDNALQSGNSQESVTEQDSKDSTYSLSSTLTLSKADYEKHKVYACEVTHQGLSSPVTKSFNRGEC

SEQ ID NO: 300 - protein, 261 aa, Artificial Sequence
  Spacer-huCD147 3A11 Lc1-415-2012
QGQSGQGLHGPCHFNNCNTLKLGGGSSGGSISSGLLSGRSANPGGGSDIQMTQSPSSLSASVGDRVTITCRASQSVRTDVGWYQQKPGKAPKLLIYYSSNRYTGVPSRFSGSGSGTDFTLTISSLQPEDFATYYCQQDYSSPYTFGQGTKLEIKRTVAAPSVFIFPPSDEQLKSGTASVVCLLNNFYPREAKVQWKVDNALQSGNSQESVTEQDSKDSTYSLSSTLTLSKADYEKHKVYACEVTHQGLSSPVTKSFNRGEC

SEQ ID NO: 301 - protein, 259 aa, Artificial Sequence
  Spacer-huCD147 3A11 Lc1-415.1-2012
QGQSGQGLHGPCHFNNCNTLGGGSSGGSISSGLLSGRSANPGGGSDIQMTQSPSSLSASVGDRVTITCRASQSVRTDVGWYQQKPGKAPKLLIYYSSNRYTGVPSRFSGSGSGTDFTLTISSLQPEDFATYYCQQDYSSPYTFGQGTKLEIKRTVAAPSVFIFPPSDEQLKSGTASVVCLLNNFYPREAKVQWKVDNALQSGNSQESVTEQDSKDSTYSLSSTLTLSKADYEKHKVYACEVTHQGLSSPVTKSFNRGEC

SEQ ID NO: 302 - protein, 258 aa, Artificial Sequence
  Spacer-huCD147 3A11 Lc1-419.3-2012
QGQSGQGLHGPCHYDLKCKGGGSSGGSISSGLLSGRSANPGGGSDIQMTQSPSSLSASVGDRVTITCRASQSVRTDVGWYQQKPGKAPKLLIYYSSNRYTGVPSRFSGSGSGTDFTLTISSLQPEDFATYYCQQDYSSPYTFGQGTKLEIKRTVAAPSVFIFPPSDEQLKSGTASVVCLLNNFYPREAKVQWKVDNALQSGNSQESVTEQDSKDSTYSLSSTLTLSKADYEKHKVYACEVTHQGLSSPVTKSFNRGEC

SEQ ID NO: 303 - protein, 257 aa, Artificial Sequence
  Spacer-huCD147 3A11 Lc1-419.4-2012
QGQSGQGLHGPCHYDLKCGGGSSGGSISSGLLSGRSANPGGGSDIQMTQSPSSLSASVGDRVTITCRASQSVRTDVGWYQQKPGKAPKLLIYYSSNRYTGVPSRFSGSGSGTDFTLTISSLQPEDFATYYCQQDYSSPYTFGQGTKLEIKRTVAAPSVFIFPPSDEQLKSGTASVVCLLNNFYPREAKVQWKVDNALQSGNSQESVTEQDSKDSTYSLSSTLTLSKADYEKHKVYACEVTHQGLSSPVTKSFNRGEC

SEQ ID NO: 304 - protein, 257 aa, Artificial Sequence
  Spacer-huCD147 3A11 Lc1-419.5-2012
QGQSGQGLHGPCHYDLRCGGGSSGGSISSGLLSGRSANPGGGSDIQMTQSPSSLSASVGDRVTITCRASQSVRTDVGWYQQKPGKAPKLLIYYSSNRYTGVPSRFSGSGSGTDFTLTISSLQPEDFATYYCQQDYSSPYTFGQGTKLEIKRTVAAPSVFIFPPSDEQLKSGTASVVCLLNNFYPREAKVQWKVDNALQSGNSQESVTEQDSKDSTYSLSSTLTLSKADYEKHKVYACEVTHQGLSSPVTKSFNRGEC

SEQ ID NO: 305 - protein, 261 aa, Artificial Sequence
  Spacer-huCD147 3A11 Lc1-440-2012
QGQSGQGTCLHLTRFNYLSCNKGGGSSGGSISSGLLSGRSANPGGGSDIQMTQSPSSLSASVGDRVTITCRASQSVRTDVGWYQQKPGKAPKLLIYYSSNRYTGVPSRFSGSGSGTDFTLTISSLQPEDFATYYCQQDYSSPYTFGQGTKLEIKRTVAAPSVFIFPPSDEQLKSGTASVVCLLNNFYPREAKVQWKVDNALQSGNSQESVTEQDSKDSTYSLSSTLTLSKADYEKHKVYACEVTHQGLSSPVTKSFNRGEC

SEQ ID NO: 306 - protein, 259 aa, Artificial Sequence
  Spacer-huCD147 3A11 Lc1-440.1-2012
QGQSGQGTCLHLTRFNYLSCGGGSSGGSISSGLLSGRSANPGGGSDIQMTQSPSSLSASVGDRVTITCRASQSVRTDVGWYQQKPGKAPKLLIYYSSNRYTGVPSRFSGSGSGTDFTLTISSLQPEDFATYYCQQDYSSPYTFGQGTKLEIKRTVAAPSVFIFPPSDEQLKSGTASVVCLLNNFYPREAKVQWKVDNALQSGNSQESVTEQDSKDSTYSLSSTLTLSKADYEKHKVYACEVTHQGLSSPVTKSFNRGEC

SEQ ID NO: 307 - protein, 259 aa, Artificial Sequence
  Spacer-huCD147 3A11 Lc1-440.1-2001
QGQSGQGTCLHLTRFNYLSCGGGSSGGSISSGLLSGRSDNHGGGSDIQMTQSPSSLSASVGDRVTITCRASQSVRTDVGWYQQKPGKAPKLLIYYSSNRYTGVPSRFSGSGSGTDFTLTISSLQPEDFATYYCQQDYSSPYTFGQGTKLEIKRTVAAPSVFIFPPSDEQLKSGTASVVCLLNNFYPREAKVQWKVDNALQSGNSQESVTEQDSKDSTYSLSSTLTLSKADYEKHKVYACEVTHQGLSSPVTKSFNRGEC

SEQ ID NO: 308 - protein, 263 aa, Artificial Sequence
  Spacer-huCD147 3A11 Lc1-440.1-3001
QGQSGQGTCLHLTRFNYLSCGGGSSGGSAVGLLAPPGGLSGRSDNHGGSDIQMTQSPSSLSASVGDRVTITCRASQSVRTDVGWYQQKPGKAPKLLIYYSSNRYTGVPSRFSGSGSGTDFTLTISSLQPEDFATYYCQQDYSSPYTFGQGTKLEIKRTVAAPSVFIFPPSDEQLKSGTASVVCLLNNFYPREAKVQWKVDNALQSGNSQESVTEQDSKDSTYSLSSTLTLSKADYEKHKVYACEVTHQGLSSPVTKSFNRGEC

SEQ ID NO: 309 - protein, 259 aa, Artificial Sequence
  Spacer-huCD147 3A11 Lc1-440.1-2007
QGQSGQGTCLHLTRFNYLSCGGGSSGGSISSGLLSGRSDIHGGGSDIQMTQSPSSLSASVGDRVTITCRASQSVRTDVGWYQQKPGKAPKLLIYYSSNRYTGVPSRFSGSGSGTDFTLTISSLQPEDFATYYCQQDYSSPYTFGQGTKLEIKRTVAAPSVFIFPPSDEQLKSGTASVVCLLNNFYPREAKVQWKVDNALQSGNSQESVTEQDSKDSTYSLSSTLTLSKADYEKHKVYACEVTHQGLSSPVTKSFNRGEC

SEQ ID NO: 310 - protein, 263 aa, Artificial Sequence
  Spacer-huCD147 3A11 Lc1-440.1-3007
QGQSGQGTCLHLTRFNYLSCGGGSSGGSAVGLLAPPGGLSGRSDIHGGSDIQMTQSPSSLSASVGDRVTITCRASQSVRTDVGWYQQKPGKAPKLLIYYSSNRYTGVPSRFSGSGSGTDFTLTISSLQPEDFATYYCQQDYSSPYTFGQGTKLEIKRTVAAPSVFIFPPSDEQLKSGTASVVCLLNNFYPREAKVQWKVDNALQSGNSQESVTEQDSKDSTYSLSSTLTLSKADYEKHKVYACEVTHQGLSSPVTKSFNRGEC

SEQ ID NO: 311 - protein, 259 aa, Artificial Sequence
  Spacer-huCD147 3A11 Lc1-440.1-2008
QGQSGQGTCLHLTRFNYLSCGGGSSGGSISSGLLSGRSDQHGGGSDIQMTQSPSSLSASVGDRVTITCRASQSVRTDVGWYQQKPGKAPKLLIYYSSNRYTGVPSRFSGSGSGTDFTLTISSLQPEDFATYYCQQDYSSPYTFGQGTKLEIKRTVAAPSVFIFPPSDEQLKSGTASVVCLLNNFYPREAKVQWKVDNALQSGNSQESVTEQDSKDSTYSLSSTLTLSKADYEKHKVYACEVTHQGLSSPVTKSFNRGEC

SEQ ID NO: 312 - protein, 263 aa, Artificial Sequence
  Spacer-huCD147 3A11 Lc1-440.1-3008
QGQSGQGTCLHLTRFNYLSCGGGSSGGSAVGLLAPPGGLSGRSDQHGGSDIQMTQSPSSLSASVGDRVTITCRASQSVRTDVGWYQQKPGKAPKLLIYYSSNRYTGVPSRFSGSGSGTDFTLTISSLQPEDFATYYCQQDYSSPYTFGQGTKLEIKRTVAAPSVFIFPPSDEQLKSGTASVVCLLNNFYPREAKVQWKVDNALQSGNSQESVTEQDSKDSTYSLSSTLTLSKADYEKHKVYACEVTHQGLSSPVTKSFNRGEC

SEQ ID NO: 313 - protein, 259 aa, Artificial Sequence
  Spacer-huCD147 3A11 Lc1-440.1-2011
QGQSGQGTCLHLTRFNYLSCGGGSSGGSISSGLLSGRSDNPGGGSDIQMTQSPSSLSASVGDRVTITCRASQSVRTDVGWYQQKPGKAPKLLIYYSSNRYTGVPSRFSGSGSGTDFTLTISSLQPEDFATYYCQQDYSSPYTFGQGTKLEIKRTVAAPSVFIFPPSDEQLKSGTASVVCLLNNFYPREAKVQWKVDNALQSGNSQESVTEQDSKDSTYSLSSTLTLSKADYEKHKVYACEVTHQGLSSPVTKSFNRGEC

SEQ ID NO: 314 - protein, 263 aa, Artificial Sequence
  Spacer-huCD147 3A11 Lc1-440.1-3011
QGQSGQGTCLHLTRFNYLSCGGGSSGGSAVGLLAPPGGLSGRSDNPGGSDIQMTQSPSSLSASVGDRVTITCRASQSVRTDVGWYQQKPGKAPKLLIYYSSNRYTGVPSRFSGSGSGTDFTLTISSLQPEDFATYYCQQDYSSPYTFGQGTKLEIKRTVAAPSVFIFPPSDEQLKSGTASVVCLLNNFYPREAKVQWKVDNALQSGNSQESVTEQDSKDSTYSLSSTLTLSKADYEKHKVYACEVTHQGLSSPVTKSFNRGEC

SEQ ID NO: 315 - protein, 263 aa, Artificial Sequence
  Spacer-huCD147 3A11 Lc1-440.1-3012
QGQSGQGTCLHLTRFNYLSCGGGSSGGSAVGLLAPPGGLSGRSANPGGSDIQMTQSPSSLSASVGDRVTITCRASQSVRTDVGWYQQKPGKAPKLLIYYSSNRYTGVPSRFSGSGSGTDFTLTISSLQPEDFATYYCQQDYSSPYTFGQGTKLEIKRTVAAPSVFIFPPSDEQLKSGTASVVCLLNNFYPREAKVQWKVDNALQSGNSQESVTEQDSKDSTYSLSSTLTLSKADYEKHKVYACEVTHQGLSSPVTKSFNRGEC

SEQ ID NO: 316 - protein, 259 aa, Artificial Sequence
  Spacer-huCD147 3A11 Lc1-440.1-2013
QGQSGQGTCLHLTRFNYLSCGGGSSGGSISSGLLSGRSANIGGGSDIQMTQSPSSLSASVGDRVTITCRASQSVRTDVGWYQQKPGKAPKLLIYYSSNRYTGVPSRFSGSGSGTDFTLTISSLQPEDFATYYCQQDYSSPYTFGQGTKLEIKRTVAAPSVFIFPPSDEQLKSGTASVVCLLNNFYPREAKVQWKVDNALQSGNSQESVTEQDSKDSTYSLSSTLTLSKADYEKHKVYACEVTHQGLSSPVTKSFNRGEC

SEQ ID NO: 317 - protein, 263 aa, Artificial Sequence
  Spacer-huCD147 3A11 Lc1-440.1-3013
QGQSGQGTCLHLTRFNYLSCGGGSSGGSAVGLLAPPGGLSGRSANIGGSDIQMTQSPSSLSASVGDRVTITCRASQSVRTDVGWYQQKPGKAPKLLIYYSSNRYTGVPSRFSGSGSGTDFTLTISSLQPEDFATYYCQQDYSSPYTFGQGTKLEIKRTVAAPSVFIFPPSDEQLKSGTASVVCLLNNFYPREAKVQWKVDNALQSGNSQESVTEQDSKDSTYSLSSTLTLSKADYEKHKVYACEVTHQGLSSPVTKSFNRGEC

SEQ ID NO: 318-338 - skipped (21 entries)

SEQ ID NO: 339 - protein, 5 aa, Artificial Sequence
  linking peptide
GSGGS

SEQ ID NO: 340 - protein, 4 aa, Artificial Sequence
  linking peptide
GGGS

SEQ ID NO: 341 - protein, 4 aa, Artificial Sequence
  linking peptide
GGSG

SEQ ID NO: 342 - protein, 5 aa, Artificial Sequence
  linking peptide
GGSGG

SEQ ID NO: 343 - protein, 5 aa, Artificial Sequence
  linking peptide
GSGSG

SEQ ID NO: 344 - protein, 5 aa, Artificial Sequence
  linking peptide
GSGGG

SEQ ID NO: 345 - protein, 5 aa, Artificial Sequence
  linking peptide
GGGSG

SEQ ID NO: 346 - protein, 5 aa, Artificial Sequence
  linking peptide
GSSSG

SEQ ID NO: 347 - protein, 13 aa, Artificial Sequence
  linking peptide
GSSGGSGGSGGSG

SEQ ID NO: 348 - protein, 11 aa, Artificial Sequence
  linking peptide
GSSGGSGGSGG

SEQ ID NO: 349 - protein, 12 aa, Artificial Sequence
  linking peptide
GSSGGSGGSGGS

SEQ ID NO: 350 - protein, 16 aa, Artificial Sequence
  linking peptide
GSSGGSGGSGGSGGGS

SEQ ID NO: 351 - protein, 10 aa, Artificial Sequence
  linking peptide
GSSGGSGGSG

SEQ ID NO: 352 - protein, 11 aa, Artificial Sequence
  linking peptide
GSSGGSGGSGS

SEQ ID NO: 353 - protein, 4 aa, Artificial Sequence
  linking peptide
GGGS

SEQ ID NO: 354 - protein, 5 aa, Artificial Sequence
  linking peptide
GSSGT

SEQ ID NO: 355 - protein, 4 aa, Artificial Sequence
  linking peptide
GSSG

SEQ ID NO: 356 - protein, 8 aa, Artificial Sequence
  cleavable moiety
TGRGPSWV

SEQ ID NO: 357 - protein, 8 aa, Artificial Sequence
  cleavable moiety
SARGPSRW

SEQ ID NO: 358 - protein, 8 aa, Artificial Sequence
  cleavable moiety
TARGPSFK

SEQ ID NO: 359 - protein, 8 aa, Artificial Sequence
  cleavable moiety
LSGRSDNH

SEQ ID NO: 360 - protein, 8 aa, Artificial Sequence
  cleavable moiety
GGWHTGRN

SEQ ID NO: 361 - protein, 8 aa, Artificial Sequence
  cleavable moiety
HTGRSGAL

SEQ ID NO: 362 - protein, 8 aa, Artificial Sequence
  cleavable moiety
PLTGRSGG

SEQ ID NO: 363 - protein, 8 aa, Artificial Sequence
  cleavable moiety
AARGPAIH

SEQ ID NO: 364 - protein, 8 aa, Artificial Sequence
  cleavable moiety
RGPAFNPM

SEQ ID NO: 365 - protein, 8 aa, Artificial Sequence
  cleavable moiety
SSRGPAYL

SEQ ID NO: 366 - protein, 8 aa, Artificial Sequence
  cleavable moiety
RGPATPIM

SEQ ID NO: 367 - protein, 4 aa, Artificial Sequence
  cleavable moiety
RGPA

SEQ ID NO: 368 - protein, 10 aa, Artificial Sequence
  cleavable moiety
GGQPSGMWGW

SEQ ID NO: 369 - protein, 10 aa, Artificial Sequence
  cleavable moiety
FPRPLGITGL

SEQ ID NO: 370 - protein, 10 aa, Artificial Sequence
  cleavable moiety
VHMPLGFLGP

SEQ ID NO: 371 - protein, 8 aa, Artificial Sequence
  cleavable moiety
SPLTGRSG

SEQ ID NO: 372 - protein, 8 aa, Artificial Sequence
  cleavable moiety
SAGFSLPA

SEQ ID NO: 373 - protein, 9 aa, Artificial Sequence
  cleavable moiety
LAPLGLQRR

SEQ ID NO: 374 - protein, 8 aa, Artificial Sequence
  cleavable moiety
SGGPLGVR

SEQ ID NO: 375 - protein, 4 aa, Artificial Sequence
  cleavable moiety
PLGL

SEQ ID NO: 376 - protein, 7 aa, Artificial Sequence
  cleavable moiety
ISSGLSS

SEQ ID NO: 377 - protein, 8 aa, Artificial Sequence
  cleavable moiety
QNQALRMA

SEQ ID NO: 378 - protein, 8 aa, Artificial Sequence
  cleavable moiety
AQNLLGMV

SEQ ID NO: 379 - protein, 8 aa, Artificial Sequence
  cleavable moiety
STFPFGMF

SEQ ID NO: 380 - protein, 8 aa, Artificial Sequence
  cleavable moiety
PVGYTSSL

SEQ ID NO: 381 - protein, 8 aa, Artificial Sequence
  cleavable moiety
DWLYWPGI

SEQ ID NO: 382 - protein, 8 aa, Artificial Sequence
  cleavable moiety
ISSGLLSS

SEQ ID NO: 383 - protein, 8 aa, Artificial Sequence
  cleavable moiety
LKAAPRWA

SEQ ID NO: 384 - protein, 8 aa, Artificial Sequence
  cleavable moiety
GPSHLVLT

SEQ ID NO: 385 - protein, 8 aa, Artificial Sequence
  cleavable moiety
LPGGLSPW

SEQ ID NO: 386 - protein, 8 aa, Artificial Sequence
  cleavable moiety
MGLFSEAG

SEQ ID NO: 387 - protein, 8 aa, Artificial Sequence
  cleavable moiety
SPLPLRVP

SEQ ID NO: 388 - protein, 8 aa, Artificial Sequence
  cleavable moiety
RMHLRSLG

SEQ ID NO: 389 - protein, 8 aa, Artificial Sequence
  cleavable moiety
LAAPLGLL

SEQ ID NO: 390 - protein, 8 aa, Artificial Sequence
  cleavable moiety
AVGLLAPP

SEQ ID NO: 391 - protein, 8 aa, Artificial Sequence
  cleavable moiety
LLAPSHRA

SEQ ID NO: 392 - protein, 8 aa, Artificial Sequence
  cleavable moiety
PAGLWLDP

SEQ ID NO: 393 - protein, 7 aa, Artificial Sequence
  cleavable moiety
GPRSFGL

SEQ ID NO: 394 - protein, 6 aa, Artificial Sequence
  cleavable moiety
GPRSFG

SEQ ID NO: 395 - protein, 12 aa, Artificial Sequence
  cleavable moiety
NTLSGRSENHSG

SEQ ID NO: 396 - protein, 12 aa, Artificial Sequence
  cleavable moiety
NTLSGRSGNHGS

SEQ ID NO: 397 - protein, 12 aa, Artificial Sequence
  cleavable moiety
TSTSGRSANPRG

SEQ ID NO: 398 - protein, 8 aa, Artificial Sequence
  cleavable moiety
TSGRSANP

SEQ ID NO: 399 - protein, 8 aa, Artificial Sequence
  cleavable moiety
VAGRSMRP

SEQ ID NO: 400 - protein, 8 aa, Artificial Sequence
  cleavable moiety
VVPEGRRS

SEQ ID NO: 401 - protein, 8 aa, Artificial Sequence
  cleavable moiety
ILPRSPAF

SEQ ID NO: 402 - protein, 8 aa, Artificial Sequence
  cleavable moiety
MVLGRSLL

SEQ ID NO: 403 - protein, 8 aa, Artificial Sequence
  cleavable moiety
QGRAITFI

SEQ ID NO: 404 - protein, 8 aa, Artificial Sequence
  cleavable moiety
SPRSIMLA

SEQ ID NO: 405 - protein, 8 aa, Artificial Sequence
  cleavable moiety
SMLRSMPL

SEQ ID NO: 406 - protein, 13 aa, Artificial Sequence
  cleavable moiety
ISSGLLSGRSDNH

SEQ ID NO: 407 - protein, 22 aa, Artificial Sequence
  cleavable moiety
ISSGLLSSGGSGGSLSGRSDNH

SEQ ID NO: 408 - protein, 22 aa, Artificial Sequence
  cleavable moiety
AVGLLAPPGGTSTSGRSANPRG

SEQ ID NO: 409 - protein, 22 aa, Artificial Sequence
  cleavable moiety
TSTSGRSANPRGGGAVGLLAPP

SEQ ID NO: 410 - protein, 24 aa, Artificial Sequence
  cleavable moiety
VHMPLGFLGPGGTSTSGRSANPRG

SEQ ID NO: 411 - protein, 24 aa, Artificial Sequence
  cleavable moiety
TSTSGRSANPRGGGVHMPLGFLGP

SEQ ID NO: 412 - protein, 18 aa, Artificial Sequence
  cleavable moiety
AVGLLAPPGGLSGRSDNH

SEQ ID NO: 413 - protein, 18 aa, Artificial Sequence
  cleavable moiety
LSGRSDNHGGAVGLLAPP

SEQ ID NO: 414 - protein, 20 aa, Artificial Sequence
  cleavable moiety
VHMPLGFLGPGGLSGRSDNH

SEQ ID NO: 415 - protein, 20 aa, Artificial Sequence
  cleavable moiety
LSGRSDNHGGVHMPLGFLGP

SEQ ID NO: 416 - protein, 22 aa, Artificial Sequence
  cleavable moiety
LSGRSDNHGGSGGSISSGLLSS

SEQ ID NO: 417 - protein, 22 aa, Artificial Sequence
  cleavable moiety
LSGRSGNHGGSGGSISSGLLSS

SEQ ID NO: 418 - protein, 22 aa, Artificial Sequence
  cleavable moiety
ISSGLLSSGGSGGSLSGRSGNH

SEQ ID NO: 419 - protein, 22 aa, Artificial Sequence
  cleavable moiety
LSGRSDNHGGSGGSQNQALRMA

SEQ ID NO: 420 - protein, 22 aa, Artificial Sequence
  cleavable moiety
QNQALRMAGGSGGSLSGRSDNH

SEQ ID NO: 421 - protein, 22 aa, Artificial Sequence
  cleavable moiety
LSGRSGNHGGSGGSQNQALRMA

SEQ ID NO: 422 - protein, 22 aa, Artificial Sequence
  cleavable moiety
QNQALRMAGGSGGSLSGRSGNH

SEQ ID NO: 423 - protein, 13 aa, Artificial Sequence
  cleavable moiety
ISSGLLSGRSGNH

SEQ ID NO: 424 - protein, 6 aa, Artificial Sequence
  spacer peptide
QGQSGQ

SEQ ID NO: 425 - protein, 120 aa, Artificial Sequence
  CD147 binding VH
EVQLQQSGPELVKPGASVKISCKASGYTFTDYYMNWVKQSHGKSLEWIGGINPNNGGTSYNQKFKGKATLTVDKSSSTAYMELRSLTSEDSAVYYCARNDGYRGYAMDYWGQGTSVTVSS

SEQ ID NO: 426 - protein, 121 aa, Artificial Sequence
  CD147 binding VH
QVQLQQSGAELAKPGASVKLSCKASGYTFTSYWMHWVKQRPGQGLEWIGYINPGSGYTKYNQTFKDKATLTADKSSSTAYMQLSSLTYEDSAVYYCARVEGYRTARYFDVWGTGTTVTVSS

SEQ ID NO: 427 - protein, 116 aa, Artificial Sequence
  CD147 binding VH
EMKLEESGGGLVQPGGSMKLSCVASGFTFSNYWMNWVRQSPEKGLEWVAQIRLKSYNYATHYAESVKGRFTISRDDSKSSVYLQMNNLRAEDTGIYYCTPDGSDYWGQGTTLTVSS

SEQ ID NO: 428 - protein, 116 aa, Artificial Sequence
  CD147 binding VH
EMKLEESGGGLVQPGGSMKLSCVASGFTFSNYRMNWVRQSPEKGLEWVAQIRLKSYNYATHYAESVKGRFTISRDDSKSSVYLQMNNLRAEDTGIYYCTPDGSDYWGQGTTLTVSS

SEQ ID NO: 429 - protein, 112 aa, Artificial Sequence
  CD147 binding VL
DIVMSQSPSSLAVSVGEKVTMSCKSSQSLLYSSNQKNYLAWYQQKPGQSPKLLIYWASTRESGVPDRFTGSGSGTDFTLTISSVKAEDLAVYYCQQYYSYPTFGAGTKLELK

SEQ ID NO: 430 - protein, 113 aa, Artificial Sequence
  CD147 binding VL
DIVMSQSPSSLAVSVGEKVTMSCKSSQSLLYNNNQKNYLAWYQQKPGQSPKLLIYWASTRESGVPDRFTGSGSGTDFTLTISSVKAEDLAVYYCQQYYSYPFTFGSGTKLEIK

SEQ ID NO: 431 - protein, 107 aa, Artificial Sequence
  CD147 binding VL
SIVMTQTPKFLLVSAGDRVTITCKASQSVSNDVAWYQQKPGQSPKLLIYYASNRYTGVPDRFTGSGYGTDFTFTISTVQAEDLAVYFCQQDYSSPYTFGGGTKLEIK

SEQ ID NO: 432 - protein, 107 aa, Artificial Sequence
  CD147 binding VL
DILMTQSPSSMSVSLGDTVSITCHASQGISSSIGWLQQKPGKSFKGLIYHGTNLEDGVPSRFTGSGSGADYSLTISSLESEDFADYYCVQYAQFPYTFGGGTKLEIK

SEQ ID NO: 433 - protein, 205 aa, Artificial Sequence
  CD147 binding VH
  misc_feature (150)..(150): Xaa can be any naturally occurring amino acid
GLLKPSETLSLTCAVYGGSFSGYYWSWIRQPPGKGLEWIGEINHSGSTNYNPSLKSRVTISVDTSKNQFSLKLSSVTAADTAVYYCARGTTEYYYYYYGMDVWGQGTTVTVSSGSASAPTLFPLVSCENSPSDTSSVAVGCLAQDFLPDXITFSWKYKNNSDISSTRGFPSVLRGGKYAATSQVLLPSKDVMQGTDEHVVTGSKE

SEQ ID NO: 434 - protein, 197 aa, Artificial Sequence
  CD147 binding VH
LVKPSETLSLTCTVSGGSISSYYWNWIRQPPGKGLEWIGYIYYSGSTNYNPSLKSRVTISVDTSKNQFSLKLSSVTAADTAVYYCARDRGVGATGFDYWGQGTLVTVSSGSASAPTLFPLVSCENSPSDTSSVAVGCLAQDFLPDSITFSWKYKNNSDISSTRGFPSVLRGGKYAATSQVLLPSKDVMQGTDEHKVC

SEQ ID NO: 435 - protein, 203 aa, Artificial Sequence
  CD147 binding VH
KKPGASVKVSCKASGYTFTSYDINWVRQATGQGLEWMGWMNPNSGNTGYAQKFQGRVTMNRNTSISTAYMELSSLRSEDTAVYYCARGGHGGSYFYSYYGMDVWGQGTTVTVSSGSASAPTLFPLVSCENSPSDTSSVAVGCLAQDFLPDSITFSWKYKNNSDISSTRGFPSVLRGGKYAATSQVLLPSKDVMQGTDEHVVCK

SEQ ID NO: 436 - protein, 199 aa, Artificial Sequence
  CD147 binding VH
EVKKPGASVKVSCKASGYTFTSYDINWVRQATGQGLEWMGWMNPNSGNTGYAQKFQGRVTMTRNTSISTAYMELSSLRSEDTAVYYCAREEWLVRYYGMDVWGQGTTVTVSSGSASAPTLFPLVSCENSPSDTSSVAVGCLAQDFLPDSITFSWKYKNNSDISSTRGFPSVLRGGKYAATSQVLLPSKDVMQGTDEHKV

SEQ ID NO: 437 - protein, 202 aa, Artificial Sequence
  CD147 binding VH
  misc_feature (147)..(147): Xaa can be any naturally occurring amino acid
  misc_feature (151)..(151): Xaa can be any naturally occurring amino acid
KLPETLSLTCAVYGGSFSGYYWSWIRQPPGKGLEWIGEINHSGSTNYNPSLKSRVTISVDTSKNQFSLKLSSVTAADTAVYYCARGAAEYYYYYYGMDVWGQGTTVTVSSGSASAPTLFPLVSCENSPSDTSSVAVGCLAQDFLPDXITFXWKYKNNSDISSTRGFPSVLRGGKYAATSQVLLPSKDVMQGTDEHVVTGSKE

SEQ ID NO: 438 - protein, 190 aa, Artificial Sequence
  CD147 binding VH
SETLSLTCAVYGGSFSGYYWSWIRQPPGKGLEWIGEINHSGSTNYNPSLKSRVTISVDTSKNQFSLKLSSVTAADTAVYYCARGGTTVTFDAFDIWGQGTMVTVSSGSASAPTLFPLVSCENSPSDTSSVAVGCLAQDFLPDSITFSWKYKNNSDISSTRGFPSVLRGGKYAATSQVLLPSKDVMQGTDE

SEQ ID NO: 439 - protein, 149 aa, Artificial Sequence
  CD147 binding VH
NPQTTLTLTCTFSGFSLITRGVGVDWIRQPPGKALQWLALIYWNDDKRYSPSLKSRLTITKDTSKNQVVLTMTNMDPVDTATYYCAHHFFDSSGYYPFDSWGQGTLVSVSSASTKGPSVFPLAPCSRSTSESTAALGCLVKDYFPEPVT

SEQ ID NO: 440 - protein, 173 aa, Artificial Sequence
  CD147 binding VH
GEGLVKPGGSLRLSCAASGFTFSSYSMNWVRQAPGKGLEWVSSISSSSSYIYYADSVKGRFTISRDNAKNSLYLQMNSLRAEDTAVYYCARDSSGWYEDYFDYWGQGTLVTVSSASTKGPSVFPLAPCSRSTSESTAALGCLVKDYFPEPVTVSWNSGALTSGVHTFPAVLQS

SEQ ID NO: 441 - protein, 159 aa, Artificial Sequence
  CD147 binding VH
LTCTFSGFSLITRGVGVDWIRQPPGKALQWLALIYWNDDKRYSPSLKSRLTITKDTSKNQVVLTMTNMDPVDTATYYCAHHFFDSSGYYPFDSWGQGTLVSVSSASTKGPSVFPLAPCSRSTSESTAALGCLVKDYFPEPVTVSWNSGALTSGVHTFQL

SEQ ID NO: 442 - protein, 167 aa, Artificial Sequence
  CD147 binding VH
GGGLVQPGGSLRLSCAASGFTFSSYAMSWVRQAPGKGLEWVSTISVSGITTYYVDSVKGRFTISRDNSKNILYLQMNSLRAEDTAVYYCAKRIFGVVWGQGTLVTVSSASTKGPSVFPLAPCSRSTSESTAALGCLVKDYFPEPVTVSWNLGALTSGVHTFPAVLQS

SEQ ID NO: 443 - protein, 148 aa, Artificial Sequence
  CD147 binding VL
LSLPVTPGEPASISCRSSQSLLHSNGYNYLDWYLQKPGQSPQLLIYLGSNRASGVPDRFSGSGSGTDFTLKISRVEAEDVGIYYCMQTRQTPRTFGQGTKVEIKRTVAAPSVFIFPPSDEQLKSGTASVVCLLNNFYPREAKEHQKSP

SEQ ID NO: 444 - protein, 147 aa, Artificial Sequence
  CD147 binding VL
SQSPSSLSASVGERVTITCRASQGIRDELGWYQQKPGKAPKRLIYVASSLQSGVPSRFSGSGSGTEFTLTISSLQPEDFATYYCLQHNGYPRTFGQGTKVEIKRTVAAPSVFIFPPSDEQLKSGTASVVCLLNNFYPREAKEHQKSP

SEQ ID NO: 445 - protein, 149 aa, Artificial Sequence
  CD147 binding VL
HSLAVSLGERATINCKSSQSVLYSFNNKNYLAWYQQKPGQPPKLLIYWASTRESGVPDRFGGSGSGTDFTLTISSLQAEDVAVYYCQQYYSTPRTFGQGTKVEIKRTVAAPSVFIFPPSDEQLKSGTASVVCLLNNFYPREAKEHQKSP

SEQ ID NO: 446 - protein, 147 aa, Artificial Sequence
  CD147 binding VL
  misc_feature (140)..(140): Xaa can be any naturally occurring amino acid
GQSPSSLSASVGDRVTITCRASQDIRDNLGWYQQKPGKAPKRLIYAASNLQSGVPSRFSGSGSGTEFTLTISSLQPEDFATYYCLQYKTYPWTFGQGTKVEIKRTVAAPSVFIFPPSDEQLKSGTASVVCLLNNFYPREXKEHQKSP

SEQ ID NO: 447 - protein, 143 aa, Artificial Sequence
  CD147 binding VL
MPVTPGEPASISCRSSQSLLHSNGYNYLDWYLQKPGQSPQLLIYLGSNRASGVPDRFSGSGSGTDFTLKISRVEAEDVGIYYCMQSLQIPRLFGPGTKVDIKRTVAAPSVFIFPPSDEQLKSGTASVVCLLSNFYPREAKVQW

SEQ ID NO: 448 - protein, 147 aa, Artificial Sequence
  CD147 binding VL
LAVSLGERATINCKSSQSVLYSFNNKNYLAWYQQKPGQPPKLLIYWASTRESGVPDRFSGSGSGTDFTLTISSLQAEDVAVYYCQQYYSTPRTFGQGTKVEIKRTVAAPSVFIFPPSDEQLKSGTASVVCLLNNFYPREAKVQWKVI

SEQ ID NO: 449 - protein, 148 aa, Artificial Sequence
  CD147 binding VL
VTQSPLSLSVTPGQPASISCKSSQSLLHSDGKTYLYWYLQKPGQPPQLLIYEAFNRFSGVPDRFSGSGSGTDFTLKISRVEAEDVGLYYCMQSIELPFTFGGGTKVEIKRTVAAPSVFIFPPSDEQLKSGTASVVCLLNNFYPRKERV

SEQ ID NO: 450 - protein, 101 aa, Artificial Sequence
  CD147 binding VL
LDIQLTQSPSSLSASVGDRVTITCRASQDISIYLAWFQQRPGKAPKSLIYAASSLQSGVPSKFSGSGSGTDFTLTISSLQPEDFATYYCQQYNSYPFTFGP

SEQ ID NO: 451 - protein, 164 aa, Artificial Sequence
  CD147 binding VL
GIRLDIQLTQSPSSLSASVGDRVTITCRASQGISIYLAWFQQRPGKAPKSLIYAASSLQSGVPSKFSGSGSGTDFTLTISSLQPEDFATYYCQQYNSYPFTFGPGTKVDIKRTVAAPSVFIFPPSDEQLKSGTASVVCLLNNFYPREAKVQWKVDNALQSGKPN

SEQ ID NO: 452 - protein, 196 aa, Artificial Sequence
  CD147 binding VH
LVKPSETLSLTCTVSGGSISSYYWNWIRQPPGKGLEWIGYIYYSGSTNYNPSLKSRVTISVDTSKNQFSLKLSSVTAADTAVYYCARDRGVGATGFDYWGQGLVTVSSGSASAPTLFPLVSCENSPSDTSSVAVGCLAQDFLPDSITFSWKYKNNSDISSTRGFPSVLRGGKYAATSQVLLPSKDVMQGTDEHKVC

SEQ ID NO: 453 - skipped

SEQ ID NO: 454 - protein, 85 aa, Artificial Sequence
  CD147 binding VH
ERATINCKSSQSVLYSSNNKNYLAWYQQKPGQPPKLLIYWASTRESGVPDRFSGSGSGTDFTLTISSLQAEDVAVYYCQQYYSTP

SEQ ID NO: 455 - protein, 86 aa, Artificial Sequence
  CD147 binding VH
ERATINCKSSQSVLYSFNNKNYLAWYQQKPGQPPKLLIYWASTRESGVPDRFSGSGSGTDFTLTISSLQAEDVAVYYCQQYYSTRT

SEQ ID NO: 456 - protein, 86 aa, Artificial Sequence
  CD147 binding VH
ERATINCKSSQSVLYSFNNKNYLAWYQQKPGQPPKLLIYWASTRESGVPDRFGGSGSGTDFTLTISSLQAEDVAVYYCQQYYSTRT

SEQ ID NO: 457 - protein, 79 aa, Artificial Sequence
  CD147 binding VL
DRVTITCRASQDIRDNLGWYQQKPGKAPKRLIYAASNLQSGVPSRFSGSGSGTEFTLTISSLQPEDFATYYCLQYKTYP

SEQ ID NO: 458 - protein, 79 aa, Artificial Sequence
  CD147 binding VL
DRVTITCRASQGIRNDLGWYQQKPGKAPKRLIYAASSLQSGVPSRFSGSGSGTEFTLTISSLQPEDFATYYCLQHNSYP

SEQ ID NO: 459 - protein, 116 aa, Artificial Sequence
  CD147 binding VH
EVKLEESGGGLVQPGGSMKLSCVASGFTFSNFWMDWVRQSPEKGLEWIAGIRLKSYNYATHYAESVKGRFTISRDDSKSSVYLQMNNLRAEDTGIYYCTDWDGAYWGQGTLVTVSA

SEQ ID NO: 460 - protein, 116 aa, Artificial Sequence
  CD147 binding VH
EVQLVESGGGLVQPGGSLKLSCAASGFTFSNFWMDWVRQASGKGLEWVGGIRLKSYNYATHYAESVKGRFTISRDDSKNTAYLQMNSLKTEDTAVYYCTRWDGAYWGQGTLVTVSS

SEQ ID NO: 461 - protein, 116 aa, Artificial Sequence
  CD147 binding VH
EVQLVESGGGLVQPGGSLRLSCAASGFTFSNFWMDWVRQAPGKGLEWVGGIRLKSYNYATHYAESVKGRFTISRDDSKNTAYLQMNSLRAEDTAVYYCTRWDGAYWGQGTLVTVSS

SEQ ID NO: 462 - protein, 116 aa, Artificial Sequence
  CD147 binding VH
EVQLVESGGGLVQPGGSLRLSCAASGFTFSNFWMDWVRQAPGKGLEWIAGIRLKSYNYATHYAESVKGRFTISRDDSKSTVYLQMNSLRAEDTAVYYCTDWDGAYWGQGTLVTVSS

SEQ ID NO: 463 - protein, 116 aa, Artificial Sequence
  CD147 binding VH
EVQLVESGGGLVQPGGSLKLSCAASGFTFSNFWMDWVRQASGKGLEWVGEIRLKSTNYATHYAESVKGRFTISRDDSKNTAYLQMNSLKTEDTAVYYCTRTSTGYWGQGTTVTVSS

SEQ ID NO: 464 - protein, 116 aa, Artificial Sequence
  CD147 binding VH
EVQLVESGGGLVQPGGSLKLSCAASGFTFSNFWMDWVRQASGKGLEWVAEIRLKSTNYATHYAESVKGRFTISRDDSKSTVYLQMNSLKTEDTAVYYCTATSTGYWGQGTTVTVSS

SEQ ID NO: 465 - protein, 116 aa, Artificial Sequence
  CD147 binding VH
EVQLVESGGGLVQPGGSLKLSCAASGFTFSNFWMDWVRQASGKGLEWVGEIRLKSTNYATHYAESVKGRFTISRDDSKNTAYLQMNSLKTEDTAVYYCTATSTGYWGQGTTVTVSS

SEQ ID NO: 466 - protein, 116 aa, Artificial Sequence
  CD147 binding VH
EVKLEESGGGLVQPGGSMKLSCVASGFTFSNFWMDWVRQSPEKGLEWVAEIRLKSTNYATHYAESVKGRFTISRDDSKSSVYLQMNNLRAEDTGIYYCTATSTGYWGQGTTLTVSS

SEQ ID NO: 467 - protein, 123 aa, Artificial Sequence
  CD147 binding VH
QVQLQQPGAEIVRPGASVKLSCKASGYTFTDYWMNWVKLRPGQGLEWIGIIDPSDSYASYNQKFKGKATLTVDESSSTAYMQLSSLTSEDSAVYYCARKSYYGGNYYYAMDYWGQGTSVTVSS

SEQ ID NO: 468 - protein, 107 aa, Artificial Sequence
  CD147 binding VL
DIVMTQSHKFMSTSVGDRVSITCKASQDVSTDVAWYQQKPGQSPKLLIYSASYRYTGVPDRFTGSGSGTDFTFTISSVQAEDLAVYYCQQHYSTPFTFGSGTKLEIK

SEQ ID NO: 469 - protein, 107 aa, Artificial Sequence
  CD147 binding VL
DIQMTQSPSSLSASVGDRVTITCKASQDVSTDVAWYQQKPGKAPKLLIYSASYRYTGVPSRFSGSGSGTDFTFTISSLQPEDIATYYCQQHYSTPFTFGQGTKLEIK

SEQ ID NO: 470 - protein, 107 aa, Artificial Sequence
  CD147 binding VL
DIQMTQSPSSLSASVGDRVTITCKASQDVSTDVAWYQQKPGKAPKLLIYSASYRYTGVPSRFSGSGSGTDFTLTISSLQPEDIATYYCQQHYSTPFTFGQGTKLEIK

SEQ ID NO: 471 - protein, 107 aa, Artificial Sequence
  CD147 binding VL
DIQMTQSPSSLSASVGDRVTITCKASQDVSTDVAWYQQKPGKSPKLLIYSASYRYTGVPSRFSGSGSGTDFTLTISSLQPEDIATYYCQQHYSTPFTFGQGTKLEIK

SEQ ID NO: 472 - protein, 107 aa, Artificial Sequence
  CD147 binding VL
DIVMTQSPSSLSASVGDRVTITCKASQDVSTDVAWYQQKPGKSPKLLIYSASYRYTGVPSRFSGSGSGTDFTLTISSLQPEDIATYYCQQHYSTPFTFGQGTKLEIK

SEQ ID NO: 473 - protein, 107 aa, Artificial Sequence
  CD147 binding VL
DIQMTQSPSSLSASVGDRVTITCKASQSVSNDVAWYQQKPGKAPKLLIYYASNRYTGVPSRFSGSGSGTDFTFTISSLQPEDIATYYCQQDYSSPYTFGGGTKVEIK

SEQ ID NO: 474 - protein, 107 aa, Artificial Sequence
  CD147 binding VL
DIQMTQSPSSLSASVGDRVTITCKASQSVSNDVAWYQQKPGKSPKLLIYYASNRYTGVPSRFSGSGSGTDFTFTISSLQPEDIATYFCQQDYSSPYTFGGGTKVEIK

SEQ ID NO: 475 - protein, 107 aa, Artificial Sequence
  CD147 binding VL
EIVMTQSPATLSVSPGERATLSCKASQSVSNDVAWYQQKPGQAPRLLIYYASNRYTGIPARFSGSGSGTEFTLTISSLQSEDFAVYYCQQDYSSPYTFGGGTKVEIK

SEQ ID NO: 476 - protein, 107 aa, Artificial Sequence
  CD147 binding VL
EIVMTQSPATLSVSPGERATLSCKASQSVSNDVAWYQQKPGQSPRLLIYYASNRYTGVPARFSGSGSGTEFTLTISSLQSEDFAVYFCQQDYSSPYTFGGGTKVEIK

SEQ ID NO: 477 - protein, 107 aa, Artificial Sequence
  CD147 binding VL
SIVMTQSPKILLVSAGDRVTITCKASQSVSNDVAWYQQKPGQSPKLLIYYASNRYTGVPDRFTGSGYGTDFTFTISTVQAEDLAVYFCQQDYSSPYTFGGGTKLEIK

SEQ ID NO: 478 - protein, 108 aa, Artificial Sequence
  CD147 binding VL
EIVLTQSPALMAASPGEKVTITCSVSSSINSINLHWYRQKSETSPKPWIYGTSNLASGVPVRFSGSGSGTSYSLTISSMEAEDAATYYCQQWSSYPLTFGAGTKLELK

SEQ ID NO: 479 - protein, 115 aa, Artificial Sequence
  CD147 binding VH
VQLVQSGAEVKKPGASVKVSCKASGYTFTGYYMHWVRQAPGQGLEWMGWINPNSGGTNYAQKFQGRVTMTRDTSASTAYMELSGLRSEDTAVYYCARGNLFIDYWGQGTLVTVSS

SEQ ID NO: 480 - protein, 118 aa, Artificial Sequence
  CD147 binding VH
EVQLVESGAEVKKPGASVRVSCRASGYTFTNYAISWVRQAPGQGLEWMGWISTYNGNTLYAQKLQGRVTMTTDTSTSTAYMELRSLRSDDTAVYYCARDTDTYYFDYWGQGTLVTVSS

SEQ ID NO: 481 - protein, 120 aa, Artificial Sequence
  CD147 binding VH
EVQLLESGAEVKKPGASVKVSCKASGYTFTSHYMHWVRQAPGQGLEWMGVINPSGGSTSYAQKFQGRVTMTRDTSTSTVYMDLSSLRSEDTAVYYCARRSEAYYHGMDVWGQGTTVTVSS

SEQ ID NO: 482 - protein, 119 aa, Artificial Sequence
  CD147 binding VH
EVQLVESGAEVKKPGASVKVSCKASGYTFTGYYMHWVRQAPGQGLEWMGWINPNSGGTNYAQKFQGRVTMTRDTSISTAYMELSSLRSDDTAVYYCARGATGGYGMDVWGQGTTVTVSS

SEQ ID NO: 483 - protein, 120 aa, Artificial Sequence
  CD147 binding VH
QVQLVQSGAEVKKPGASVKVSCKASGYGFTSYAIHWLRQAPGQRLEWMGWINPGNGNTKYSQKFQGRVTITRDTSATTAYMELTSLRSEDSDTAVYYCARDLDGGSFDHWGQGTLVTVSS

SEQ ID NO: 484 - protein, 119 aa, Artificial Sequence
  CD147 binding VH
QVQLVQSGAEVKKPGASVKISCKASGYTFTTYWIHWVRQAPGQGPEWMGLIKPSSGSTTYPQKFQGRVTMTRDTSTSTVYMELSSLRSEDTAVYYCARLEGIGAASNDWGQGTLVTVSS

SEQ ID NO: 485 - protein, 124 aa, Artificial Sequence
  CD147 binding VH
QVQLVQSGSELKKPGASVKVSCKASGYSFRSYDINWVRQAPGQGLEWMGFLNPSDGGTTYAQKFQGRVTVTSDTSTSTVYMELSSLRSENTAVYYCARVGITSTETRAEYFQHWGQGTLVTVSS

SEQ ID NO: 486 - protein, 118 aa, Artificial Sequence
  CD147 binding VH
QVQLVQSGAEVKKPGASVKLSCKASGYTFTRYWVHWVRQAPGQGPEWMGLIKPRDGATTYAQKFQGRVTLTRDTSTTTVYMELTSLRSEDTGIYYCGLLEGDDAFDVWGQGTMVTVSS

SEQ ID NO: 487 - protein, 119 aa, Artificial Sequence
  CD147 binding VH
QVQLVESGAEVKKPGASVKVSCKASGYTFTSYYMHWVRQAPGQGLEWMGIINPSGGSTSYAQKFQGRVTMTRDTSTSTVYMELSSLRSEDTAVYYCARESYGSGSLDYWGQGTLVTVSS

SEQ ID NO: 488 - protein, 122 aa, Artificial Sequence
  CD147 binding VH
EVQLLESGAEVKKPGASVKVSCKASGYTFTGYYMHWVRQAPGQGLEWMGWINPNSGGTNYAQKFQGRVTMTRDTSISTAYMELSRLRSDDTAVYYCARPKGHSGGWYAFDIWGQGTMVTVSS

SEQ ID NO: 489 - protein, 119 aa, Artificial Sequence
  CD147 binding VH
QVQLQQSGPGLVKPAQTLSLTCAISGDSVSSSRAAWNWIRQSPSRGLEWLGRTFYRSRWNNEYAETVKSRITINPDTSTNHFSLQLTSVSPEDTAIYYCARGGGNFDSWGQGTLVTVSS

SEQ ID NO: 490 - protein, 119 aa, Artificial Sequence
  CD147 binding VH
QVQLVQSGAEVKKPGASVKVSCKASGYTFTSYYMHWVRQAPGQGLEWMGIINPSGGSTSYAQKFQGRVTMTRDTSTSTVYMELSSLRSEDTAVYYCARESEDSIAFDIWGQGTMVTVSS

SEQ ID NO: 491 - protein, 117 aa, Artificial Sequence
  CD147 binding VH
QVQLVQSGAEVRKPGASVMVSCKASGYPFTSYAIHWLRQAPGQSLEWMGWIKPANGDITYSQKFQGRVTITGDISATTAYMELSSLRSEDTAMYYCTKGGGGYFDYWGQGTLVTVSS

SEQ ID NO: 492 - protein, 118 aa, Artificial Sequence
  CD147 binding VH
QVQLVQSGAEVKKPGESLRISCQGSGYSFINHWISWVRQMPGKGLEWLGRIDPSDSYTNYSPSVQGHVTISVDKSISTAYLQWSSLKASDTAIYYCARHDRNVYFDPWGQGTLVTVSS

SEQ ID NO: 493 - protein, 117 aa, Artificial Sequence
  CD147 binding VH
QVQLVQSGAEVRKPGASVMVSCKASGYPFTSYAIHWLRQAPGQSLEWMGWIKPANGDITYSQKFQGRVTITGDISATTAYMELSSLRSEDTAMYYCAKGGGGYFDYWGQGTLVTVSS

SEQ ID NO: 494 - protein, 115 aa, Artificial Sequence
  CD147 binding VH
EVQLVQSGAEVKKPGASVKVSCKASGYTFTGYYMHWVRQAPGQGLEWMGWINPNSGGTNYAQKFQGWVTMTRDTSISTAYMELSRLRSDDTAVYYCARDQDFDYWGQGTLVTVSS

SEQ ID NO: 495 - protein, 117 aa, Artificial Sequence
  CD147 binding VH
QVQLVESGGGVVQPGRSLRLSCAASGFTFSTYAMHWVRQAPGRGLEWVAGISYDGSNKYHADPVKGRFTISRDNSKNTLYLQMNNLRVEDSAVYYCAGDRSGGLDVWGQGTTVTVSS

SEQ ID NO: 496 - protein, 116 aa, Artificial Sequence
  CD147 binding VH
EVQLVESGAEVKKPGASVKVSCKASGYTFTGYYMHWVRQAPGQGLEWMGWINPNSGGTNYAQKFQGRVTMTRDTSISTAYMELRSLRSDDTAVYYCARGGGAFDIWGQGTMVTVSS

SEQ ID NO: 497 - protein, 115 aa, Artificial Sequence
  CD147 binding VH
QVQLVQSGAEVKKPGASVKVSCKASGYTFTGYYMHWVRQAPGQGLEWMGWINPNSGGTNYAQKFQGWVTMTRDTSISTAYMELSRLRSDDTAVYYCARDQDFDYWGQGTLVTVSS

SEQ ID NO: 498 - protein, 116 aa, Artificial Sequence
  CD147 binding VH
QMQLVQSGAEVKKPGASVKVSCKASGYTFTGYYIHWVRQAPGQGLEWMGWINPNSGGTIYAQKFQGRVTMTRDTSISTAYMELSRLRSDDTAVYYCARGSTNFDSWGQGTLVTVSS

SEQ ID NO: 499 - protein, 120 aa, Artificial Sequence
  CD147 binding VH
QVQLVESGAEVKKPGASVKVSCKASGYTFTSHYMHWVRQAPGQGLEWMGVINPSGGSTSYAQKFQGRVTMTRDTSTSTVYMDLSSLRSEDTAVYYCARRSEAYYHGMDVWGQGTTVTVSS

SEQ ID NO: 500 - protein, 117 aa, Artificial Sequence
  CD147 binding VH
EVQLLESGAEVKKPGSSVKVSCKASGYPFTSYAIHWLRQAPGQSLEWMGWIKPANGDITYSQKFQGRVTITGDISATTAYMELSSLRSEDTAMYYCAKGGGGYFDYWGQGTLVTVSS

SEQ ID NO: 501 - protein, 120 aa, Artificial Sequence
  CD147 binding VH
QVQLVQSGGGVVQPGRSLRLSCAASGFTFSSYAMHWVRQAPGKGLEWVAVISYDGTNKYYADSVKGRFTISRDSSKNALYLQMNSLRTEDTALYYCARGGGWVVHAMDVWGQGTTVTVSS

SEQ ID NO: 502 - protein, 110 aa, Artificial Sequence
  CD147 binding VL
LPVLTQPASVSGSPGQSITISCTGTSSDVGSYNLVSWYQQHPGKAPKLMIYDVSKRPSGVSNRFSGSKSGNTASLTISGLQAEDEADYYCSSYTSSSTFVFGGGTKLTVL

SEQ ID NO: 503 - protein, 110 aa, Artificial Sequence
  CD147 binding VL
QPVLTQPASVSGSPGQSITISCTGTSSDVGGYNYVSWYQQHPDKPPKLIIYYVSNRPSGVSNRFSGSKSGNTASLTISGLQAEDEADYYCASYRSNTNYVFGTGTKVTVL

SEQ ID NO: 504 - protein, 110 aa, Artificial Sequence
  CD147 binding VL
QSVLTQPPSASGTPGQRVTISCSGSSSNIGSNYVYWYQQFPGTTPKLLIYRNNQRPSGVPDRFSGSKSATSASLAISGLRSEDEADYYCAAWDDSLSGWVFGGGTKLTVL

SEQ ID NO: 505 - protein, 111 aa, Artificial Sequence
  CD147 binding VL
QAGLTQPASVSGSPGQSITISCTGTSSDVGGYNYVSWYQQHPGKAPKLMIYNVTKRPSGVSNRFSGSKSGNTASLTISGLQAEDEADYYCSSYTSGTTLSVFGTGTKLTVL

SEQ ID NO: 506 - protein, 111 aa, Artificial Sequence
  CD147 binding VL
QSALTQPRSVSGSPGQSVTISCTGTSNDVGAYNYVSWYQQHPAKAPKLMIYGVTKRPSGVPDRFSGANSGNTATLTITRVEAGDEADYFCQVWERSSGQYVFGTGTKLTVL

SEQ ID NO: 507 - protein, 110 aa, Artificial Sequence
  CD147 binding VL
QSVVTQPASVSGSPGQSITISCTGTSSDVGSYNLVSWYQQHPGKAPKLMIYDVTNRPSGVSNRFSGSKSGNTASLTISGLQAEDEADYYCSSYTRSSTYVFGTGTKVTVL

SEQ ID NO: 508 - protein, 109 aa, Artificial Sequence
  CD147 binding VL
QAVVTQEPSLTVSPGGTVTLTCGSSTGAVTSGHYPYWFQQKPGQAPRTLIYDTSNKHSWTPARFSGSLLGGKAALTLSGAQPEDEAEYYCLLSYSGARVFGTGTKVTVL

SEQ ID NO: 509 - protein, 109 aa, Artificial Sequence
  CD147 binding VL
QTVVTQEPSLTVSPGGTVTLTCGSSTGDVTSGHYPYWFQQKPGQAPRTLIYDTSNKHSWTPARFSASLLGGKAALTLSGAQPEDEADYYCLLAYSEVRVFGGGTQLTVL

SEQ ID NO: 510 - protein, 110 aa, Artificial Sequence
  CD147 binding VL
QSVLTQPPSASGSPGQSVTISCTGSASDIGHSFYVSWYRQYPGKAPDLLIFQVNQRPSGVPNRFSASKSGNTASLTVSGLQIEDEADYYCSSYAGGTSIVFGSGTKLTVL

SEQ ID NO: 511 - protein, 109 aa, Artificial Sequence
  CD147 binding VL
QTVVTQEPSLTVSPGGTVTLTCGSSTGAVTSGHYPYWFQQKPGQPPRTLIYDTSNKHSWTPARFSGSLLGGKAALTLSGAQPEDEAEYYCLLSYSGARVFGGGTKLTVL

SEQ ID NO: 512 - protein, 108 aa, Artificial Sequence
  CD147 binding VL
ETTLTQSPATLSVSPGERATLSCRASQSVSSYLAWYQQKPGQAPRLLIYDASNRATGIPARFSGSGSGTDFTLTISSLEPEDFAVYYCQQRSNWPQITFGQGTRLEIK

SEQ ID NO: 513 - protein, 109 aa, Artificial Sequence
  CD147 binding VL
QTVVTQEPSLTVSPGGTVTLTCGSDTGAVNSGHYPYWFQQKPGQAPRALIYDTGNKHSWTPARFSGSLLGGKAALTLSGAQPEDEAEYYCLLSYSGTRIFGGGTKLTVL

SEQ ID NO: 514 - protein, 110 aa, Artificial Sequence
  CD147 binding VL
QSVLTQPPSASGTPGQRVTISCSGSSSNIGRRAVNWYQQLPGTAPKLLIYDNDRRPSGIPDRFSGSKSGTSATLGITELQTGDEADYYCGTWDTNLSAGLFGGGTKLTVL

SEQ ID NO: 515 - protein, 90 aa, Artificial Sequence
  CD147 binding VL
SGSSSNIGNNYVSWYQQLPGTAPKLLIYDNNKRPSGIPDRFSGSKSGTSATLGITGLQTGDEADYYCGTWDSSLSAGDVVFGGGTKLTVL

SEQ ID NO: 516 - protein, 109 aa, Artificial Sequence
  CD147 binding VL
AIQLTQSPGTLSLAPGERATLSCRASQSVSSSYIAWYQQRPGQAPRLLIYGASNRATDIPARFIGSGSGTDFTLTISSLEPEDFAVYYCQQRSNWPRNTFGQGTRLEIK

SEQ ID NO: 517 - protein, 109 aa, Artificial Sequence
  CD147 binding VL
QTVVTQEPSLTVSPGGTVTLTCGSNTGAVTSGHYPYWFQQKPGQAPRTLIYDATNKQSWTPARFSGSLLGDKAALTLSGAQPEDEAEYYCLLSYSGVRVFGGGTKLTVL

SEQ ID NO: 518 - protein, 109 aa, Artificial Sequence
  CD147 binding VL
QTVVTQEPSLTVSPGGTVTLTCGSSTGAVTSGHYPYWFQQKPGQAPRTLIYDTSNKHSWTPARFSGSLLGGKAALTLSGAQPEDEADYFCLLSSSGARVFGGGTKLTVL

SEQ ID NO: 519 - protein, 110 aa, Artificial Sequence
  CD147 binding VL
QSVLTQPRSVSGSPGQSVTISCTGTSSDVGGYNLVSWYQQHPGKAPKLMIYDVHKRPSGTSTRFSGSKSGNTASLTISGLQAEDEADYYCSSYRSGSTYVFGTGTKVTVL

SEQ ID NO: 520 - protein, 110 aa, Artificial Sequence
  CD147 binding VL
SYELTQPRSVSGSPGQSVTISCTGTSSDVGGYKYVSWYQQHPGKAPKLMIYDVSKRPSGVSNRFSGSKSGNTASLTISGLQAEDEADYYCSSYTSSSTYVFGTGTKVTVL

SEQ ID NO: 521 - protein, 110 aa, Artificial Sequence
  CD147 binding VL
SYVLTQPASVSGSPGQSITISCTGTSSDVGNYNLVSWYQQHPGKAPKLLVYDVSNRPSGVSNRFSGSKSGNTASLTISGLQAEDEADYYCSSYTTSSTYVFGIGTKVTVL

SEQ ID NO: 522 - protein, 110 aa, Artificial Sequence
  CD147 binding VL
QSVLTQPASMSGSPGQSITISCTGTSSDVGTYDLVSWYQQYPGKAPKLLIYDVANRPSGVSNRFSGSKSGNTASLTVSGLQAEDEADYYCSSYAGTKVYVFGTGTKVTVL

SEQ ID NO: 523 - protein, 107 aa, Artificial Sequence
  CD147 binding VL
DVVMTQSPSSLSASVGDRVTITCRASQGIATNLAWFQQKPGKAPKSLIYAASSLQSGVPSKFSGSGSGTAFTLTISSLQAEDFGTYYCQQYNNYPYTFGQGTKVEIK

SEQ ID NO: 524 - protein, 107 aa, Artificial Sequence
  CD147 binding VL
DIVMTQSPSSLSASVGDRVTITCRASQGISNSLAWYQQKSGKAPKLLLYAASGLESGVPSRFSGSGSGTDYTLTISSLQPEDFATYYCQQSYSMPLTFGGGTKVEIK

SEQ ID NO: 525 - protein, 112 aa, Artificial Sequence
  CD147 binding VL
QPVLTQPASVSGSPGQSITISCTGTSSDVGGYNLVAWYQQHPGKAPKLMIYDVSKRPSGVSNRFSGSKSGNTASLTISGLQAEDEADYYCSSYTSSSTSHYVFGTGTKVTVL

SEQ ID NO: 526 - protein, 110 aa, Artificial Sequence
  CD147 binding VL
QAVLTQPASVSGSPGQSITISCTGTSSDVGSYNLVSWYQQHPGKAPKLMIYEVRKRPSGVSNRFSASKSGNTASLTISGLQAEDEADYYCSSFTSSSTFVFGAGTKLTVL

SEQ ID NO: 527 - protein, 110 aa, Artificial Sequence
  CD147 binding VL
SYVLTQPASVSGSPGQSITISCTGTSSDVGGTNYVSWYQQHPGKAPKLMIFDVSNRPSGVSNRFSGSKSGNTASLTISGLQAEDEADYYCSSYTSMRTLVFGGGTKLTVL

SEQ ID NO: 528 - protein, 110 aa, Artificial Sequence
  CD147 binding VL
QAGLTQPPSASGSPGQSVTISCTGTSSDVGGYNSVSWYQQHPGKAPKLMIYDVSNRPSGVSNRFSGSKSGNTASLTISGLQAEDEADYYCSSYINSGTLVFGGGTKLTVL

SEQ ID NO: 529 - protein, 110 aa, Artificial Sequence
  CD147 binding VL
QSVLTQPASVSGSPGQSITISCTGTSADVGHYNLVSWYQQHPGKAPKLMIYDVTKRPSGVSTRFSGSKSGNTASLTISGLQAEDESDYYCSSYTSSSTYVFGTGTKLTVL

SEQ ID NO: 530 - protein, 107 aa, Artificial Sequence
  CD147 binding VL
EIVMTQSPSSLSASVGDRVTITCRASRNIKTALAWFQQRPGQAPKSLIYAASSLHSGVTSRFSGSGFGTDFTLTINSLQPEDVATYYCQQYDSYPITFGQGTRLEIK

SEQ ID NO: 531 - protein, 110 aa, Artificial Sequence
  CD147 binding VL
QAGLTQPASVSGSPGQWITISCTGTSSDVGAYNLVSWYQQYPGKAPKLMIYDVTKRPSGVSDRFSGSKSGNTASLTISGLQAEDEADYYCSSYTSSTTYVFGTGTQLTVL

SEQ ID NO: 532 - protein, 112 aa, Artificial Sequence
  CD147 binding VL
QPVLTQPRSVSGSPGQSVTISCTGTSSDVGGYNLVSWYQQHPGRAPKLMIYDVSDRPSGVSDRFSGSKSGNTASLTISGLQAEDEADYYCSSFTSRTTPAYVFGTGTKLTVL

SEQ ID NO: 533 - protein, 109 aa, Artificial Sequence
  CD147 binding VL
QSVVTQPPSVSAAPGQKVTISCSGSSSNIGNNYVSWYQQLPGTAPKLLIYDNNKRPSGIPDRFSGSKSGNTASLTISGLQAEDEADYYCCSYAGSNTLIFGGGTKVTVL

SEQ ID NO: 534 - protein, 111 aa, Artificial Sequence
  CD147 binding VL
QSVLTQPASVSGSPGQSITISCTGTSSDVGSYNLVSWYQQHPGKAPKLMIYDVSERPSGVPDRFSGSKSGNTASLTISGLQAEDEADYYCSSYTSSSTLYVFGTGTKLTVL

SEQ ID NO: 535 - protein, 118 aa, Artificial Sequence
  CD147 binding VH
MGWSCILFLVATATGSIVMTQTPTFLVVSAGDRVTITCKASQSVINDVAWYQQKPGQSPKLLIFYASNRNTGVPDRFRGSGYGTDFRFTISTVQAEDLAVYFCQQDYSPPRTRGSGTK

SEQ ID NO: 536 - protein, 231 aa, Artificial Sequence
  CD147 binding VL
MGWSCIILFLVATATGSIVMTQTPTFLVVSAGDRVTITCKASQSVINDVAWYQQKPGQSPKLLIFYASNRNTGVPDRFTGSGYGTDFTFTISTVQAEDLAVYFCQQDYSPPFTFGSGTKLEIKRTVAAPSVFIFPPSDEQLKSGTASVVCLLNNFYPREAKVQWKVDNALQSGNSQESVTEQDSKDSTYSLLSSTLTLSKADYEKHKVYACEVTHQGLSSPVTKSFNRGEC

SEQ ID NO: 537 - protein, 466 aa, Artificial Sequence
  CD147 binding HC
MGWSCIILFLVATATGEVKLEESGGGLVQPGGSMKLSCVASGFTFSDAWMDWVRQSPEKGLEWVAEIRSKANNHAPYYTESVKGRFTISRDDSKSIIYLQMNNLRAEDTFIYYCTRDSTATHWGQGTLVTVSAASTKGPSVFPLAPSSKSTSGGTAALGCLVKDYFPEPVTVSWNSGALTSGVHTFPAVLQSSGLYSLSSVVTVPSSSLGTQTYICNVNHKPSNTKVDKRVEPKSCDKTHTCPPCPAPELLGGPSVFLFPPKPKDTLMISRTPEVTCVVVDVSHEDPEVKFNWYVDGVEVHNAKTKPREEQYNSTYRVVSVLTVLTVLHQDWLNGKEYKCKVSNKALPAPIEKTISKAKGQPREPQVYTLPPSRDELTKNQVSLTCLVKGFYPSDIAVEWESNGQPENNYKTTPPVLDSDGSFFLYSKLTVDKSRWQQGNVFSCSVMHEALHNHYTQKSLSLSPGK

SEQ ID NO: 538 - protein, 116 aa, Artificial Sequence
  CD147 binding VH
EVQLVESGGGLVQPGGSLRLSCAASGFTFSNFWMNWVRQAPGKGLEWVSEIRLKSNNYATHYAESVKGRFTISRDDSKNTLYLQMNSLKTEDTAVYYCTSYDYEYWGQGTLVTVSA

SEQ ID NO: 539 - protein, 116 aa, Artificial Sequence
  CD147 binding VH
EVQLVESGGGLVQPGGSLKLSCAASGFTFSNFWMNWVRQAPGKGLEWVAEIRLKSNNYATHYAESVKGRFTISRDDSKNTLYLQMNSLRTEDTAVYYCTSYDYEYWGQGTLVTVSA

SEQ ID NO: 540 - protein, 107 aa, Artificial Sequence
  CD147 binding VL
DIQMTQSPSTLSASVGDRVTLSCKASENVGTYVSWYQQKPGKAPKLLIYGASNRYTGVPSRFTGSGSGTDFTLTISSLQPEDFATYYCGQSYSYPFTFGSGTKLEIK

SEQ ID NO: 541 - protein, 107 aa, Artificial Sequence
  CD147 binding VL
DIQMTQSPASLSASVGDRVTISCKASENVGTYVSWYQQKPGQTPKLLIYGASNRYTGVPSRFSGSGSGTDFTLTISSLQPDDFATYYCGQSYSYPFTFGSGTKLEIK

SEQ ID NO: 542 - protein, 107 aa, Artificial Sequence
  CD147 binding VL
DIQMTQSPSSLSASVGDRVTLTCKASENVGTYVSWYQQKPGQAPKLLIYGASNRYTGVPSRFTGSGSGTDFTLTISSLQPDDFATYYCGQSYSYPFTFGSGTKLEIK

SEQ ID NO: 543 - protein, 117 aa, Artificial Sequence
  CD147 binding VH
EVQLVESGGGLVQPGGSLRLSCAASGFTFSDAWMDWVRQAPGKGLEWVGEIRSKANNHAPYYTESVKGRFTISRDDSKNSLYLQMNSLKTEDTAVTYCARDSTATHWGRGTLVTVSS

SEQ ID NO: 544 - protein, 108 aa, Artificial Sequence
  CD147 binding VL
AIQMTQSPSSLSASVGDRVTITCKASQSVINDVAWYQQKPGKAPKLLIYYASNRNTGVPSRFSGSGSGTDFTLTISSLQPEDFATYYCQQDYSPPFTFGPGTKVDIKR

SEQ ID NO: 545 - protein, 108 aa, Artificial Sequence
  CD147 binding VL
EIVLTQSPATLSLSPGERATLSCKASQSVINDVAWYQQKPGQAPRLLIYYASNRNTGIPARFSGSGSGTDFTLTISSLEPEDFAVYYCQQDYSPPFTFGPGTKVDIKR

SEQ ID NO: 546 - protein, 5 aa, Artificial Sequence
  CD147 binding VH CDR1
NFWMD

SEQ ID NO: 547 - protein, 19 aa, Artificial Sequence
  CD147 binding VH CDR2
  MISC_FEATURE (1)..(1): Xaa is Gly or Glu
  MISC_FEATURE (7)..(7): Xaa is Tyr or Thr
XIRLKSXNYATHYAESVKG

SEQ ID NO: 548 - protein, 5 aa, Artificial Sequence
  CD147 binding VH CDR3
  MISC_FEATURE (1)..(1): Xaa is Trp or Thr
  MISC_FEATURE (2)..(2): Xaa is Asp or Ser
  MISC_FEATURE (3)..(3): Xaa is Gly or Thr
  MISC_FEATURE (4)..(4): Xaa is Ala or Gly
XXXXY

SEQ ID NO: 549 - protein, 11 aa, Artificial Sequence
  CD147 binding VL CDR1
  MISC_FEATURE (5)..(5): Xaa is Asp or Ser
  MISC_FEATURE (8)..(8): Xaa is Thr or Asn
KASQXVSXDVA

SEQ ID NO: 550 - protein, 7 aa, Artificial Sequence
  CD147 binding VL CDR2
  MISC_FEATURE (1)..(1): Xaa is Ser or Tyr
  MISC_FEATURE (4)..(4): Xaa is Tyr or Asn
XASXRYT

SEQ ID NO: 551 - protein, 9 aa, Artificial Sequence
  CD147 binding VL CDR3
  MISC_FEATURE (3)..(3): Xaa is His or Asp
  MISC_FEATURE (6)..(6): Xaa is Thr or Ser
  MISC_FEATURE (8)..(8): Xaa is Phe or Tyr
QQXYSXPXT

SEQ ID NO: 552 - protein, 19 aa, Artificial Sequence
  CD147 binding VH CDR2
GIRLKSYNYATHYAESVKG

SEQ ID NO: 553 - protein, 5 aa, Artificial Sequence
  CD147 binding VH CDR3
WDGAY

SEQ ID NO: 554 - protein, 11 aa, Artificial Sequence
  CD147 binding VL CDR1
KASQDVSTDVA

SEQ ID NO: 555 - protein, 7 aa, Artificial Sequence
  CD147 binding VL CDR2
SASYRYT

SEQ ID NO: 556 - protein, 9 aa, Artificial Sequence
  CD147 binding VL CDR3
QQHYSTPFT

SEQ ID NO: 557 - protein, 19 aa, Artificial Sequence
  CD147 binding VH CDR2
EIRLKSTNYATHYAESVKG

SEQ ID NO: 558 - protein, 5 aa, Artificial Sequence
  CD147 binding VH CDR3
TSTGY

SEQ ID NO: 559 - protein, 11 aa, Artificial Sequence
  CD147 binding VL CDR1
KASQSVSNDVA

SEQ ID NO: 560 - protein, 7 aa, Artificial Sequence
  CD147 binding VL CDR2
YASNRYT

SEQ ID NO: 561 - protein, 9 aa, Artificial Sequence
  CD147 binding VL CDR3
QQDYSSPYT

SEQ ID NO: 562 - protein, 5 aa, Artificial Sequence
  CD147 binding VH CDR1
DYWMN

SEQ ID NO: 563 - protein, 17 aa, Artificial Sequence
  CD147 binding VH CDR2
IIDPSDSYASYNQKFKG

SEQ ID NO: 564 - protein, 14 aa, Artificial Sequence
  CD147 binding VH CDR3
KSYYGGNYYYAMDY

SEQ ID NO: 565 - protein, 12 aa, Artificial Sequence
  CD147 binding VL CDR1
SVSSSINSINLH

SEQ ID NO: 566 - protein, 7 aa, Artificial Sequence
  CD147 binding VL CDR2
GTSNLAS

SEQ ID NO: 567 - protein, 9 aa, Artificial Sequence
  CD147 binding VL CDR3
QQWSSYPLT

SEQ ID NO: 568 - protein, 10 aa, Artificial Sequence
  CD147 binding VH CDR1
GFTFSNFWMN

SEQ ID NO: 569 - protein, 19 aa, Artificial Sequence
  CD147 binding VH CDR2
EIRLKSNNYATHYAESVKG

SEQ ID NO: 570 - protein, 5 aa, Artificial Sequence
  CD147 binding VH CDR3
YDYEY

SEQ ID NO: 571 - protein, 11 aa, Artificial Sequence
  CD147 binding VL CDR1
KASENVGTYVS

SEQ ID NO: 572 - protein, 7 aa, Artificial Sequence
  CD147 binding VL CDR2
GASNRYT

SEQ ID NO: 573 - protein, 9 aa, Artificial Sequence
  CD147 binding VL CDR3
GQSYSYPFT

SEQ ID NO: 574 - protein, 5 aa, Artificial Sequence
  CD147 binding VH CDR1
DAWMD

SEQ ID NO: 575 - protein, 19 aa, Artificial Sequence
  CD147 binding VH CDR2
EIRSKANNHAPYYTESVKG

SEQ ID NO: 576 - protein, 6 aa, Artificial Sequence
  CD147 binding VH CDR3
DSTATH

SEQ ID NO: 577 - protein, 11 aa, Artificial Sequence
  CD147 binding VL CDR1
KASQSVINDVA

SEQ ID NO: 578 - protein, 7 aa, Artificial Sequence
  CD147 binding VL CDR2
YASNRNT

SEQ ID NO: 579 - protein, 9 aa, Artificial Sequence
  CD147 binding VL CDR3
QQDYSPPFT

SEQ ID NO: 580 - protein, 107 aa, Artificial Sequence
  CD147 binding VH
  misc_feature (9)..(10): Xaa can be any naturally occurring amino acid
  misc_feature (13)..(13): Xaa can be any naturally occurring amino acid
  misc_feature (21)..(22): Xaa can be any naturally occurring amino acid
  misc_feature (42)..(43): Xaa can be any naturally occurring amino acid
  misc_feature (60)..(60): Xaa can be any naturally occurring amino acid
  misc_feature (65)..(65): Xaa can be any naturally occurring amino acid
  misc_feature (80)..(81): Xaa can be any naturally occurring amino acid
  misc_feature (83)..(83): Xaa can be any naturally occurring amino acid
DIQMTQSPXXLSXSVGDRVTXXCKASENVGTYVSWYQQKPGXXPKLLIYGASNRYTGVPXRFTGXGSGTDFTLTISSLQXXDXATYYCGQSYSYPFTFGSGTKLEIK

SEQ ID NO: 581 - protein, 116 aa, Artificial Sequence
  CD147 binding VL
  misc_feature (5)..(5): Xaa can be any naturally occurring amino acid
  misc_feature (23)..(23): Xaa can be any naturally occurring amino acid
  misc_feature (49)..(49): Xaa can be any naturally occurring amino acid
  misc_feature (79)..(80): Xaa can be any naturally occurring amino acid
  misc_feature (89)..(89): Xaa can be any naturally occurring amino acid
  misc_feature (94)..(94): Xaa can be any naturally occurring amino acid
EVQLXESGGGLVQPGGSLRLSCXASGFTFSNFWMNWVRQAPGKGLEWVXEIRLKSNNYATHYAESVKGRFTISRDDSKXXLYLQMNSLXTEDTXVYYCTSYDYEYWGQGTLVTVSA

SEQ ID NO: 582 - protein, 128 aa, Artificial Sequence
  CD147 binding VL
QVQLQESGGGSVQAGGSLRLSCAASGYTFSSSNCMGWFRQAPGKEREDVAIISVRGGITYYADSVKGRFTISRDSAKNTLSLQMNSLKPEDTAVYYCAADNPKYRALSDAHCNWSYRYWGQGTQVTVS

SEQ ID NO: 583 - protein, 10 aa, Artificial Sequence
  CD147 binding VL CDR1
GYTFSSSNCM

SEQ ID NO: 584 - protein, 7 aa, Artificial Sequence
  CD147 binding VL CDR2
SVRGGIT

SEQ ID NO: 585 - protein, 20 aa, Artificial Sequence
  CD147 binding VL CDR3
AADNPKRALSDAHCNWSYRY

SEQ ID NO: 586 - protein, 5 aa, Artificial Sequence
  CD147 binding VH CDR1
SYGIS

SEQ ID NO: 587 - protein, 17 aa, Artificial Sequence
  CD147 binding VH CDR2
WINPNSGGTNYAQKFQG

SEQ ID NO: 588 - protein, 10 aa, Artificial Sequence
  CD147 binding VH CDR3
GRGSYYAFDI

SEQ ID NO: 589 - protein, 17 aa, Artificial Sequence
  CD147 binding VL CDR1
KSSQSVLYSSNNKNYLA

SEQ ID NO: 590 - protein, 7 aa, Artificial Sequence
  CD147 binding VL CDR2
WASTRES

SEQ ID NO: 591 - protein, 8 aa, Artificial Sequence
  CD147 binding VL CDR3
QQYYSTPT

SEQ ID NO: 592 - protein, 7 aa, Artificial Sequence
  CD147 binding VH CDR1
SGGYYWS

SEQ ID NO: 593 - protein, 16 aa, Artificial Sequence
  CD147 binding VH CDR2
YIYYSGSTYYNPSLKS

SEQ ID NO: 594 - protein, 13 aa, Artificial Sequence
  CD147 binding VL CDR1
SGSSSNIGQNSVT

SEQ ID NO: 595 - protein, 7 aa, Artificial Sequence
  CD147 binding VL CDR2
YDDLLHS

SEQ ID NO: 596 - protein, 11 aa, Artificial Sequence
  CD147 binding VL CDR3
ASWDDSLKGPV

SEQ ID NO: 597 - protein, 5 aa, Artificial Sequence
  CD147 binding VH CDR1
SYGMS

SEQ ID NO: 598 - protein, 17 aa, Artificial Sequence
  CD147 binding VH CDR2
TISSGGSYTYYQDSIKG

SEQ ID NO: 599 - protein, 6 aa, Artificial Sequence
  CD147 binding VH CDR3
GDWADY

SEQ ID NO: 600 - protein, 11 aa, Artificial Sequence
  CD147 binding VL CDR1
KASQDINSYLS

SEQ ID NO: 601 - protein, 7 aa, Artificial Sequence
  CD147 binding VL CDR2
RANRLVA

SEQ ID NO: 602 - protein, 9 aa, Artificial Sequence
  CD147 binding VL CDR3
LQYDEFPLT

SEQ ID NO: 603 - protein, 5 aa, Artificial Sequence
  CD147 binding VH CDR1
TYWIE

SEQ ID NO: 604 - protein, 17 aa, Artificial Sequence
  CD147 binding VH CDR2
EFLPGSGSTNFNEKFKG

SEQ ID NO: 605 - protein, 11 aa, Artificial Sequence
  CD147 binding VH CDR3
SGGNFGARFAS

SEQ ID NO: 606 - protein, 16 aa, Artificial Sequence
  CD147 binding VL CDR1
RSSKSLLSNNGNTYLY

SEQ ID NO: 607 - protein, 7 aa, Artificial Sequence
  CD147 binding VL CDR2
RMSSLAS

SEQ ID NO: 608 - protein, 9 aa, Artificial Sequence
  CD147 binding VL CDR3
MQHLEYPFT

SEQ ID NO: 609 - protein, 119 aa, Artificial Sequence
  CD147 binding VH
QVQLVQSGAEVKEPGASVKVSCKASGYTFTSYGISWVRQAPGQGLEWMGWINPNSGGTNYAQKFQGRVTMTRDMSISTAYMELSRLRSDDTAVYYCARGRGSYYAFDIWGQGTMVTVSS

SEQ ID NO: 610 - protein, 115 aa, Artificial Sequence
  CD147 binding VH
EVQLVESGGDLVKPGGSLKLSCAASGFTFSSYGMSWVRQTPDKRLEWVATISSGGSYTYYQDSIKGRFTISRDNAKNTLYLQMSSLKSEDTAMYYCSIGDWADYWGQGTTLTVSS

SEQ ID NO: 611 - protein, 120 aa, Artificial Sequence
  CD147 binding VH
QVQLQQSGAELMKPGASVKISCKTSGYTFSTYWIEWVKQRPGHGPEWIGEFLPGSGSTNFNEKFKGKATFTADKSSDTAYMQLSSLTSEDSAVYYCTRSGGNFGARFASWGQGTLVTVSA

SEQ ID NO: 612 - protein, 216 aa, Artificial Sequence
  CD147 binding LC
DSVLTQPPSVSGAPRQTVTISCSGSSSNIGQNSVTWYQRLPGEAPKLLIYYDDLLHSGVSDRFSGSKSGTSASLAISGLQSEDEAEYYCASWDDSLKGPVFGGGTKLTVLGQPKAAPSVTLFPPSSEELQANKATLVCLISDFYPGAVTVAWKADSSPVKAGVETTTPSKQSNNKYAASSYLSLTPEQWKSHKSYSCQVTHEGSTVEKTVAPTECS

SEQ ID NO: 613 - protein, 112 aa, Artificial Sequence
  CD147 binding VL
DIQMTQSPDSLAVSLGERATINCKSSQSVLYSSNNKNYLAWYQQKPGQPPKLLIYWASTRESGVPDRFSGSGSGTDFTLTISSLQAEDVAVYYCQQYYSTPTFGQGTKVEIK

SEQ ID NO: 614 - protein, 107 aa, Artificial Sequence
  CD147 binding VL
DIKMTQSPSSMYASLGERVTITCKASQDINSYLSWFQQKPGKSPKTLIHRANRLVAGVPSRFSGSGSGQVYSLTISSLEYEDMGIYFCLQYDEFPLTFGAGTKLELN

SEQ ID NO: 615 - protein, 112 aa, Artificial Sequence
  CD147 binding VL
DIVMTQAAPSVPVTPGESVSISCRSSKSLLSNNGNTYLYWFLQRPGQSPHLLIYRMSSLASGVPDRFSGSGSGTAFTLRISRVEAEDVGVYYCMQHLEYPFTFGGGTKLEIK

SEQ ID NO: 616 - protein, 8 aa, Artificial Sequence
  cleavable sequence
PRFRIIGG

SEQ ID NO: 617 - protein, 9 aa, Artificial Sequence
  cleavable sequence
SSRHRRALD

SEQ ID NO: 618 - protein, 14 aa, Artificial Sequence
  cleavable sequence
RKSSIIIRMRDVVL

SEQ ID NO: 619 - protein, 15 aa, Artificial Sequence
  cleavable sequence
SSSFDKGKYKKGDDA

SEQ ID NO: 620 - protein, 15 aa, Artificial Sequence
  cleavable sequence
SSSFDKGKYKRGDDA

SEQ ID NO: 621 - protein, 4 aa, Artificial Sequence
  cleavable sequence
IEGR

SEQ ID NO: 622 - protein, 4 aa, Artificial Sequence
  cleavable sequence
IDGR

SEQ ID NO: 623 - protein, 7 aa, Artificial Sequence
  cleavable sequence
GGSIDGR

SEQ ID NO: 624 - protein, 6 aa, Artificial Sequence
  cleavable sequence
PLGLWA

SEQ ID NO: 625 - protein, 8 aa, Artificial Sequence
  cleavable sequence
GPQGIAGQ

SEQ ID NO: 626 - protein, 8 aa, Artificial Sequence
  cleavable sequence
GPQGLLGA

SEQ ID NO: 627 - protein, 5 aa, Artificial Sequence
  cleavable sequence
GIAGQ

SEQ ID NO: 628 - protein, 8 aa, Artificial Sequence
  cleavable sequence
GPLGIAGI

SEQ ID NO: 629 - protein, 8 aa, Artificial Sequence
  cleavable sequence
GPEGLRVG

SEQ ID NO: 630 - protein, 8 aa, Artificial Sequence
  cleavable sequence
YGAGLGVV

SEQ ID NO: 631 - protein, 8 aa, Artificial Sequence
  cleavable sequence
AGLGVVER

SEQ ID NO: 632 - protein, 8 aa, Artificial Sequence
  cleavable sequence
AGLGISST

SEQ ID NO: 633 - protein, 8 aa, Artificial Sequence
  cleavable sequence
EPQALAMS

SEQ ID NO: 634 - protein, 8 aa, Artificial Sequence
  cleavable sequence
QALAMSAI

SEQ ID NO: 635 - protein, 8 aa, Artificial Sequence
  cleavable sequence
AAYHLVSQ

SEQ ID NO: 636 - protein, 8 aa, Artificial Sequence
  cleavable sequence
MDAFLESS

SEQ ID NO: 637 - protein, 8 aa, Artificial Sequence
  cleavable sequence
ESLPVVAV

SEQ ID NO: 638 - protein, 8 aa, Artificial Sequence
  cleavable sequence
SAPAVESE

SEQ ID NO: 639 - protein, 8 aa, Artificial Sequence
  cleavable sequence
DVAQFVLT

SEQ ID NO: 640 - protein, 8 aa, Artificial Sequence
  cleavable sequence
VAQFVLTE

SEQ ID NO: 641 - protein, 8 aa, Artificial Sequence
  cleavable sequence
AQFVLTEG

SEQ ID NO: 642 - protein, 8 aa, Artificial Sequence
  cleavable sequence
PVQPIGPQ

SEQ ID NO: 643 - protein, 273 aa, Artificial Sequence
  anti-CTLA-4 scFv
GGGSGGGGSGSGGGSGGGGSGGGEIVLTQSPGTLSLSPGERATLSCRASQSVSSSYLAWYQQKPGQAPRLLIYGASSRATGIPDRFSGSGSGTDFTLTISRLEPEDFAVYYCQQYGSSPLTFGGGTKVEIKRSGGSTITSYNVYYTKLSSSGTQVQLVQTGGGVVQPGRSLRLSCAASGSTFSSYAMSWVRQAPGKGLEWVSAISGSGGSTYYADSVKGRFTISRDNSKNTLYLQMNSLRAEDTAVYYCATNSLYWYFDLWGRGTLVTVSSAS

SEQ ID NO: 644 - protein, 264 aa, Artificial Sequence
  anti-CD3epsilon scFv
GGGSGGGGSGSGGGSGGGGSGGGQVQLQQSGAELARPGASVKMSCKASGYTFTRYTMHWVKQRPGQGLEWIGYINPSRGYTNYNQKFKDKATLTTDKSSSTAYMQLSSLTSEDSAVYYCARYYDDHYCLDYWGQGTTLTVSSGGGGSGGGGSGGGGSQIVLTQSPAIMSASPGEKVTMTCSASSSVSYMNWYQQKSGTSPKRWIYDTSKLASGVPAHFRGSGSGTSYSLTISGMEAEDAATYYCQQWSSNPFTFGSGTKLEINR

SEQ ID NO: 645 - protein, 7 aa, Artificial Sequence
  spacer peptide
QGQSGQG

SEQ ID NO: 646 - protein, 5 aa, Artificial Sequence
  spacer peptide
QGQSG

SEQ ID NO: 647 - protein, 4 aa, Artificial Sequence
  spacer peptide
QGQS

SEQ ID NO: 648 - protein, 3 aa, Artificial Sequence
  spacer peptide
QGQ

SEQ ID NO: 649 - protein, 2 aa, Artificial Sequence
  spacer peptide
QG

SEQ ID NO: 650 - protein, 8 aa, Artificial Sequence
  cleavable sequence
PRFKIIGG

SEQ ID NO: 651 - protein, 10 aa, Artificial Sequence
  CD147 binding VH CDR3
DRGTGDAFDI

SEQ ID NO: 652 - protein, 127 aa, Artificial Sequence
  CD147 binding VH
MGWSCIILFLVATATGEVKLEESGGGLVQPGGSMKLSCVASGFTFSDAWMDWVRQSPEKGLEWVAEIRSKANNHAPYYTESVKGRFTISRDDSKSIIYLQMNNLRAEDTGIYYCTRDSTATHWGQGT

SEQ ID NO: 653-665 - skipped (13 entries)

SEQ ID NO: 666 - protein, 6 aa, Artificial Sequence
  spacer peptide
GQSGQG

SEQ ID NO: 667 - protein, 5 aa, Artificial Sequence
  spacer peptide
QSGQG

SEQ ID NO: 668 - protein, 4 aa, Artificial Sequence
  spacer peptide
SGQG

SEQ ID NO: 669 - protein, 3 aa, Artificial Sequence
  spacer peptide
GQG

SEQ ID NO: 670-679 - skipped (10 entries)

SEQ ID NO: 680 - protein, 15 aa, Artificial Sequence
  cleavable moiety
ISSGLLSGRSANPRG

SEQ ID NO: 681 - protein, 18 aa, Artificial Sequence
  cleavable moiety
AVGLLAPPTSGRSANPRG

SEQ ID NO: 682 - protein, 17 aa, Artificial Sequence
  cleavable moiety
AVGLLAPPSGRSANPRG

SEQ ID NO: 683 - protein, 13 aa, Artificial Sequence
  cleavable moiety
ISSGLLSGRSDDH

SEQ ID NO: 684 - protein, 13 aa, Artificial Sequence
  cleavable moiety
ISSGLLSGRSDIH

SEQ ID NO: 685 - protein, 13 aa, Artificial Sequence
  cleavable moiety
ISSGLLSGRSDQH

SEQ ID NO: 686 - protein, 13 aa, Artificial Sequence
  cleavable moiety
ISSGLLSGRSDTH

SEQ ID NO: 687 - protein, 13 aa, Artificial Sequence
  cleavable moiety
ISSGLLSGRSDYH

SEQ ID NO: 688 - protein, 13 aa, Artificial Sequence
  cleavable moiety
ISSGLLSGRSDNP

SEQ ID NO: 689 - protein, 13 aa, Artificial Sequence
  cleavable moiety
ISSGLLSGRSANP

SEQ ID NO: 690 - protein, 13 aa, Artificial Sequence
  cleavable moiety
ISSGLLSGRSANI

SEQ ID NO: 691 - protein, 18 aa, Artificial Sequence
  cleavable moiety
AVGLLAPPGGLSGRSDDH

SEQ ID NO: 692 - protein, 18 aa, Artificial Sequence
  cleavable moiety
AVGLLAPPGGLSGRSDIH

SEQ ID NO: 693 - protein, 18 aa, Artificial Sequence
  cleavable moiety
AVGLLAPPGGLSGRSDQH

SEQ ID NO: 694 - protein, 18 aa, Artificial Sequence
  cleavable moiety
AVGLLAPPGGLSGRSDTH

SEQ ID NO: 695 - protein, 18 aa, Artificial Sequence
  cleavable moiety
AVGLLAPPGGLSGRSDYH

SEQ ID NO: 696 - protein, 18 aa, Artificial Sequence
  cleavable moiety
AVGLLAPPGGLSGRSDNP

SEQ ID NO: 697 - protein, 18 aa, Artificial Sequence
  cleavable moiety
AVGLLAPPGGLSGRSANP

SEQ ID NO: 698 - protein, 18 aa, Artificial Sequence
  cleavable moiety
AVGLLAPPGGLSGRSANI

SEQ ID NO: 699-712 - skipped (14 entries)

SEQ ID NO: 713 - protein, 13 aa, Artificial Sequence
  cleavable moiety
ISSGLLSGRSDNI

SEQ ID NO: 714 - protein, 18 aa, Artificial Sequence
  cleavable moiety
AVGLLAPPGGLSGRSDNI

SEQ ID NO: 715-788 - skipped (74 entries)

SEQ ID NO: 789 - protein, 8 aa, Artificial Sequence
  cleavable moiety
LSGRSGNH

SEQ ID NO: 790 - protein, 9 aa, Artificial Sequence
  cleavable moiety
SGRSANPRG

SEQ ID NO: 791 - protein, 8 aa, Artificial Sequence
  cleavable moiety
LSGRSDDH

SEQ ID NO: 792 - protein, 8 aa, Artificial Sequence
  cleavable moiety
LSGRSDIH

SEQ ID NO: 793 - protein, 8 aa, Artificial Sequence
  cleavable moiety
LSGRSDQH

SEQ ID NO: 794 - protein, 8 aa, Artificial Sequence
  cleavable moiety
LSGRSDTH

SEQ ID NO: 795 - protein, 8 aa, Artificial Sequence
  cleavable moiety
LSGRSDYH

SEQ ID NO: 796 - protein, 8 aa, Artificial Sequence
  cleavable moiety
LSGRSDNP

SEQ ID NO: 797 - protein, 8 aa, Artificial Sequence
  cleavable moiety
LSGRSANP

SEQ ID NO: 798 - protein, 8 aa, Artificial Sequence
  cleavable moiety
LSGRSANI

SEQ ID NO: 799 - protein, 8 aa, Artificial Sequence
  cleavable moiety
LSGRSDNI

SEQ ID NO: 800 - protein, 8 aa, Artificial Sequence
  cleavable moiety
MIAPVAYR

SEQ ID NO: 801 - protein, 8 aa, Artificial Sequence
  cleavable moiety
RPSPMWAY

SEQ ID NO: 802 - protein, 8 aa, Artificial Sequence
  cleavable moiety
WATPRPMR

SEQ ID NO: 803 - protein, 8 aa, Artificial Sequence
  cleavable moiety
FRLLDWQW

SEQ ID NO: 804 - protein, 5 aa, Artificial Sequence
  cleavable moiety
ISSGL

SEQ ID NO: 805 - protein, 7 aa, Artificial Sequence
  cleavable moiety
ISSGLLS

SEQ ID NO: 806 - protein, 6 aa, Artificial Sequence
  cleavable moiety
ISSGLL

SEQ ID NO: 807 - protein, 19 aa, Artificial Sequence
  cleavable moiety
GLSGRSDNHGGAVGLLAPP

SEQ ID NO: 808 - protein, 21 aa, Artificial Sequence
  cleavable moiety
GLSGRSDNHGGVHMPLGFLGP

SEQ ID NO: 809-1036 - skipped (228 entries)

SEQ ID NO: 1037 - protein, 6 aa, Artificial Sequence
  linking peptide
GGSGGS
